United States Patent Application Publication US 2026/0275333 A1 - sequence listing, part 24

SEQ ID NO: 3045 - RNA, 64444167 nt, Homo sapiens (residues 49,407,198-51,555,336 of 64,444,167)
  source 1..64444167: mol_type = mRNA
agggaagacttcctgcaggaaacaccacttgagtcttgtggggagaagagtttgccaagcagccaccgaccacatggtccagctcattattttacagatggggaaactgagactggtggggaaactgagaatggttctaggcccggctctgccaccgtcccgctgtacgaccttggccaagtctttcttcttcagtcttcccatctgtacaatgagatgacctctagggtcagcctcaccttctgggacagaagtctcaaactggcagctcctgggctgaattctcctgctcctggctgttacctgccagagaccaggaggtgtttgagctgagacctgtgtgaaggttaccaactttgtaaattagatgccacctaaaagcggtgattcttgatcaggggcggttttaccccccaggggacatttggcaatgtctggagacatttttgattgtcacactgggtgggggttgtgtgtggggtcgctactggcctctaatgagtatacgccagggatgctgctgaacaatcacaggacggccccacagcagagaactctccagccccaaatgtcaccagtgcggaggctgagaagccccgcctaaaagtccagtccttctgggccactctggctcctgggaaggccccaggaccccgtggtctttgtacttggtgactgatctccagccttcctgccgctgtctggagctgtcctctgactgcaccgtcaccatgctttctccccactaggccctggctccctctagcctccgctttccagggcagggcctgcctctccagctcacattttgactatactgggtcaaacctgatagcaccctggacataggcgcctgtctgttaagactcctgttttccacaattgcagacagatgcacagagagtgtcactagcttgatcaaagtcgcacagcaaagggagtgttggggctgggatttgagcccagataccttgaccccccccgcccccagcccatttactgcaattttttaaatttttttttttatttttttttgagacggagtctcgctctgtcgcccaggctggagggcagtggcgcgatctcggctcactgcaagctccgcctcctgggttcacgccattctcctgcctcagcctctggagtagctgggactacaggcgcccgccaccacgcctggctaattttttgtattttttagtagagacggggtttcaccatgttagccagatggtctcgatctgctgacctcatgatccgcccgccttggcctcccaaagtgctgggattacaggcgtgagccaccacgcccggcctccctgcagttttgtttctgaaaattgacttcctttgggtctgggttttctatgcctcctctcctcaacattcattgccttcctggtttgaactgagccacaaagttacattggaaatggaaacagaaggtgtctttgagaccgtctcccagggtgatgtgctgcggtctcagaaggactctctgacaatgtcacacgagggaggatgggagaatggtatgaatggtgggaactgaggtggcagccacaacacaatggtgggaaaaacaggctccgcactgggttccagcattggagcttcatgctagacccaggacaaattccttcaccgctccaagccttgctttccccatctgcagtgggagacagtgagacttccttaatcgtggaactgtgaatatttaatgggaacgcggatgtggagggctggcccagggcttgttcaatgaggggacctggggtggccactagctcctgggcctgtggaggcaggggatgctctggtggattccagaagatgacagtgggctctcctctctggagggtggacgaaggcaagcgcctctctgactgccttgctttatccttggagaattctccccagtgcccctctgtccactctcatgccacagttatcaccccaagcctttaaccagcagtcccctgggtgctgagtacgtaaccaagaggggagtcctgagccgccattcagcccttctctggcttggacacactccacgttgcatgtccattcggttgcatgtcctgagtgctttctgtgtgccaggcactgtgctgggctctgggagtcactgtccccaagacagcagaggagccaacaaacagatgaaatggcagggagggagttagtgggcgatggagagagtgccaatgggagggaggcagagggttaagaaagcccctctgaggatgcctgctaagcagaggtctgaggccaagcactgtggggaagaggatacagcgtgtgcaaaggccctgagataggaacggtcgtgtttgggcaccagaaaggaggccagtgtggccggtgtggaagaagcaaaggaaagagtggccagagatgataatggagaggcaggcgggtggcagatcgggcagagctttgaaggccggggtgaggaacttgcaatttattttaaggacctagaggaagaggaggctctgggccctgggtggatgagctgccttacttcttggaagcaccagggctcatgggagaacctgaccgtcactcaacccccgaaacctggctggcttgtatgcagcctgtccccgcatcaggaggggccaagcgacacctcgctgcacacagcagcctcattcctgcctccctacctttgctcagacaggatcccctgcctggggtggcctctcctctccctgatttgcccactcttcctcaggaaaccttccctggcagctagagcctatggggccctcctcctcccaaccactctcctggtgttgaaatccactggggtagtttgctgtcaatgaagatcccagggtcttccacagagataatgattcaggtgatctgtgctaggacccaggagttcacatctttacaaacacttccacgtgattcctctgtccggcattggagagacatagctgctggcatgtttccagagctacttcaggcaacagggcacgcagtatgtgtgagggggagaagcagggggctcagtggaatcagaaggccctgggttcacatctcagctttaacacttacccagctgggcgactgtgggctaatcaggcagagctttgaaggccagggtgaggagcttccaccacctcttagagcctcagtttctttctttttttttttttggagacagagtcttgttctgtcacccaagctggagtgcagtggtgtgagcttggctcactgcaacctccacctcctgggttcacaccattctcctgcctcagcctcctgaatagctgggattacaagtgcctgccaccatgcctggctaatttttgtgtttttagtagagatggggtttcactatgttcgccaggctggtctggaactcctgacctcaggtgatccacctgccttggcctgccaaagtgctgggattataggcgtgagccaccgtgcctggctgagtctcagtttcttcatttataaggtggggacagtcacactgacctcagagtattgtgaaagggatgacaaatataatgtgcctaacccaagaggttgcccacagttggtgcttaatagatgcagcctggggcccactccacacttgcttccctaagggcctgaataaggcaatgctctctaaaccagggctcagcaaactttgtctgtaaaagggtcagagagtaaatattttaggctttgggggccgcatgatctctgtcacaacccttaaactctgcagggcagcacagacgcggccacagataaacagaaatgagtttgtgagttatggctctgttccaaaaaccctgatggtcctaaaatttaaattttatatggttttcacatgtcacgaaacaatatttttctttggatgtttttcagccacttgaaaatgtaaaaactgttcttagcttgagggctgtaccaaaacagggggtgggctagatgtggcccacaggccctggattgctggcccccgctccagaggctttacatgtcttagctcataggaccctgatgagataggcagccctatgttcagatgaagaaacggagtctcagagagactggaatcctcgggcaaggttccacagcagaaatagtagatattttagtctttgtgcaccatttggtctctgttgcaagagataactgtgagatttgaactcaggcagagctgggctcagagcccctgttattaaccacagtacactgtctcgtggaagccacacaggccacagatacaccacatttcagaaccagtgaccttatctcttaaaaccagaatctctgccttcatatgagcctaggtgggaaaggctgggctggtcaggcaggaaagacagtcttttgagcttagagggtggagggggcttctagggccattggccacctgagctgcagccccgggcacgctttgcagtcccctttcctgcgctgaccctatctggtaggggtgagcctgcctgagtaattaggtctgactgctgcaggcccgctgaggacttcacgctcccaacattctcctccgtcttattcatgtttggtatttttattacattattttgacatgacattccctaagtgacattcagctaaactgtgtttttgtagaatagggacttgccactctctcggcactgctgcattcatgatgacagccacatgtctgacatctcccccagggtgcaattacatgttgacaaaagaaaactctgaaaaaatttagtgtggaaggaaaaagctcaagctgccttaattaataagttaattaattttcattcatttgtactgttggcgatatagtggtgaacatgatagtcaagattccttaccacaatgaagcttactttctagtaggggagtcagacaataaacaaataaacaaggtaatagcagattgtgataagtgctatgaaggaaaaaaaatactgagatgggatattaagtggggcagaatatgtccctgttatccaacctctccttttcttagtgttatagatccactgatgtgcattgggaaacatactgcccagaatagagactgtttcccagcctcccttacagctaggcatggccaatggatatggtagaagtgagcagatgcctggggccttacgtgtccacaggcatagaagcgtgcgcctggcacttgctctttccctcttccaccagctagaaattctctctctcatacctctcttatctctcttttcctactctatctatctatctgtctacttatgcaccatctatatgttcagtaatctgtccatttgttcatctgttatctatccatccatccatccatccatccatccatccatccatccatccattcggcaagcatttatggagagcctgtggcagattctggggatgcaaaaactaaataaactcaatctatcccctcaagaagcccagagccccttcagcagagtaagcacctaagttgctttatgaaacataacagaaatcatagagttcaaattccactctgccactttgctcatatgacctcaagatagtgactttttacccctttgaaccttaactttctcatgaatacaatggagatgataatctctgcctctgaagattcgatgagatcagaaaggtagagcactttttagagagcctggcacacagcaggcattcaaaatactcttcttattagtctacgtgggaactggggaagtttcttggaggcttctgggcttgacataaaaggatgaaaagaatttggatgtgtgagattggaagaggagaaagggaattctgggcagagggtacggtaagagcaaaggcaaaggggcagggaaatttagggttcatcgaggagccagtgagagaggtgtgcctccctgagcatttccctccctgagcattctcctggcagcaggttccagagactgaaaaggacagggacagggtggggtgggggtgattgacaggctcagaggggtgaggacctgcagtccaagtgacccaaatagccacgggcagagagaactgggttatgtgcattaatctccaccccgggcaggctcccctccaccctctatctgggctctcgggccttgctgggtgggaggaagattgttttgacacttggatgtcgcttgggcttctcaaacttaacaaggccaaagagctcttgatcccccactacctgctctgtactatgttttgccttttttggcaaatggtgcctccatcctcccagatcttcaggctgtgacccaagagccctcctcgactcctttctgttcatcggcaaatcccatgggttccaccttcaaagtagtctgagcacttctcctgcctccccgatcatcaccctgggccaggcccctgatgtatcctaccaggactgttacagtggcctcctcactgctgtccctgtgctgtccctatgtcctccctcacccccgcagtctgttttccaatcagaacactctttttaaagcatgcattgatcctgccactgccctcctcaaaagcccccagtggagtcccagtgcacctggaatgaaagccagcgcctcacacagccttcaagaccctgtctgatctggccccggctacctctctccactcacatccaccagctgagctaaacctgctgcagccactggccctgctgctcctccaatatcccagactgggtccagcctcagggcctttgcacttacagttcctgccaggaatgctcctctcctagatctctgcaggtctttcttatctttcagcgttcagctcatccgttatccccagagggacctccctggccaccctagccactttatcctcatctattatctcatgaccctctttcagggttttggaagcactcatcatttccttcttgacttggtaattgtctcattcactagaatgaagtttccctgagaggacaggaactatgtctgtcttgatccctgtgcaacactagctgcctgttacacagtaggtactcagtaaatgtttgctggatgaatgaatacacaataccttccctagtggggatgttgaagcgacctctcataactagaaacacactcaacgggagcattttcgagacatctgagtggtgtggcccctgaagatcatgggagctaccacacccactgtacagatgtggaagctgaggtccagaaggaaagggaaggaacggggccccaggcacatagccctgccagagcagaaccaaggctgggacccagatcttctgcccctcagcctctcaggcaggcactggttcccagtccttgcctcatggaatcttcctgaaagcccccgaagtttgcagatctgccctacttcagccgctcatcttcccctgctccacgtggagagctcttctagatgggttggtttctggaaagcccacaaggaaggagggaaatgcagcctttcccctctggcgcctgtttcccttggtaactgtggggtatgggctgtgggcaggtgtgggtgtggagaggagagatctccagggtaggggtttgtgctgcctccagggccacagccaagggtggcccagccccagatgcccctaccagcctctttcctgcatcctgccagaccctggctgccgggagctctcattatgccattggcagccacatgaccctccctcgacctcacgaagattctggatgggagttcaggccatattcaggcagggtcaggccacagttcacagctcagtgtggtcatgtagctttggaatggcttcttctctctgtgagcctcagtctccccatgagtaagatggagcaaaacccaatgacattgcagggaaataaaaaggaaaatcttcttgctaccacaagaaatatcagcaaccacagtttgagcacctgctgcatgcacttgcctaagtactttaattgtagctttcaagccttctggactggggaccagagtaataaatatagttctaaaaaaaaaacccggcgagtacacataccctgaaataaacgctccacccacaagacgtatccccatgatgataatgtactctgatactttctgttcttgggttttcagtggtggttgtgatcccttagattgattttatgaccatcagtttgaaaagcactgtgttaactcatttaaacctcacaaaaccctataagagaagaactattaatatccccattttatagatgaggaagcagcttcagaggttgcgtcactctccccagtaagtgatggagctcagaggccaccgcagtgctcatatccttaagcatggtgcatggctgcccctttaagtgctggacctgggtaagaggggccccctcctgccacagggcagatggaaacctttcctcgatcctctggcaacttcccttccttggctccgggcaactcctcttttggttttcctaagcaagatgtcaggttagtaaaacagatcccagagtttaattaaaataatgagtggtattagaggaaggatgccagggccagccagagggagaaaatgagttacggttttgttcatggagaggggcggagggagagcacgagcagagggagaaagtctgtctgactctagaaaggcaataatgtttcgatgtggttttgctctcactcttgtctcctctgactcctccttccagagaatcccaaggatctttctataagatctaatcttgtcgctcctctgctttagagtcttctatggctccccagtgccttcagaataaatccacacttctcactgaggtttgaaggccctacgggatctgagtcctactaacggcacccctattgccatgcagctccctgcttcccacaccattccgatcccagaggtctcacatgggctgtgttctctccctactcctcttgcctgggctaactccagctcttccttgaaggcctgtttaaatgtcacttggggcatagagctgaacccaaatgataatacatgcttcctgtgctcatggttcagaggggagacagacaacacatacataaacgcataaaaggatagatcagccgggcacagtggctcacacctgtaatcccagcacattgggaggccaaggcaggaggattgtttgaggccataagttcaagaccagcctggggaacatagtgagacccccatttctaaaaacaaaacaaaacaaaacaaaacacacttaggtgtggtggcacacaccggtagtcctagctacttggcaggctgagacaggaggatcacttgggcccagaagtttgaggttgcagtgagctatgattgtgtcactgcactccagcctgggcaacacagtgagacgctgtctctactaaaaaacaagacagatcatttaagacagggatcagcaccaggtggaaaggcaaaggactaagctttttgaggaccatctgcccggcaccgttcagaatggcttgtgtgtatttacctgttgaatcttgctccggtctgagaggtggaagctctatcacctccacctcatgaggggatgagctggaaagtaggttgctcacagcttctcctgggttccacttgagcagcctggctttggaactcaagctgttaaccatcgcccttcacggtggctccaaacattgaggggatgggacaggctgggtaggtggtgggagaaagaaggtggggatgcaacttgatattcagtggcctgagaaggtgacctgtgagctgaacagtgggtctggccatgtaaggacagggggaagaataagggaagcagcagacgccttgagaatataaatacggcaaagagcccaaggtggctgaagtggtggtcccgcgagttcccatccacctgaaatgtgattggcccaggccagcgtgggtattgggagaggccatagctaagtccactgaaggaagctattggggtggtgcagggggtgggggctgtgatgctgtgagccccagccttgtgacagagcccacggctctttcctctctgtaggtgatgctggcaaaaggcctaggggatccagctggggagggactgccagtcttcccagcaaccaaaatttgggggaggaccacgcctatctcttggaatatcatgttttttcgcttatcgtattggaggcttcattcattcattccctcccatctcaccaaatctcacctgtcccccaaagtcctctctaacctcatctcctactacccttctctcacatggtcccatgcagccacagtggccttcttgctgttctcccatagattgagctcatttctaccccaggcctttgcactatagctccctctgcctggaatgctcttcccccactctgggactgccctcctcattcaagcctcagctcccaggaaggggttggtgtgggcaaaagggagtgccattccttgcagacctcacaatccctaaggatctttattttattttattattgttattttaaaggcaggatctcactccatcacccaggctggagtgcagtagcacaatcatagctcactgcagcctcgaactgctgggctcaagggaacctcccgcctcagcctcctgagtagatgtaactatgggcaggacccaggcgcctggcttctaaggatcttaaacaagagttttcatgatataggtataagattattcactgcagcattgtttattcgatcaaaaagtttggaaacaacctcaatgtccatcaacagggaaaaattaactcaacagagggtcatttatatgcagctgtaaatatgaacactatgcagctgtaaaaagaacagagatggctcaatatgcataaatagggaacagtccccgaggtatgctgttagcaagcaaagcaccgcgagaacagaatgtataacaaactcccatttcaataaaacaaggaaaaaagaatatgtacatatatgcattcacttatatatggatatgttatttgtggaagcgatcacaggaaattggtaacagtggctgcccctggggaggaggacggggtggctgggggacagggtgggagagaacttttcactgtgtgcccttttgaacactttgactttcatactagggaaatatagtagctattcagaaaactgacattccagtatttttagaattttgaccttatctctaaatgggttaggtacacaaacagggacagaatgataacaacgaaaaaagactgcattcctcaaacaacactacccctgcatcccttactgaaccactcctagagaatgccatgggtttaaaatacgaatatataaacaaatcgaataaatcctggggttatcttgtgagttatgtgagttacacatttatattatgttgtgattttatgcaggttgtcacgatttgctcaatgttacatcttaaatgtactgcaactttagggatgtcttcattttgttgttgttttctttataaattaatattccaggagtctcaaaaaaatagaagtcttccaggcttctctccgctggagggaccctgtcccaattctccttagggagtgaaagagacaagggaggcccgagaacagggacagtaaacccgagttctcaggaggaacagcagcccacagtcccaatttaggtgctcccaggggatggggacaggctgaccaaggcacagaggcagggccaggcctacccctggggatgtagatctgctgaacatgggcaagagaaaattcccaccctgtgaagctggtcttgctgcggactggaggggaatgtctgtggtttttaagctgtctcctctggaaacagcatctcacagcgccgagctaggagtgctacccagttctgaacaattccagagcccaggctttttagccactaaatcaaagtgagagatgttgacttagtgtagccatggcctgatctgaatcgacgttaaagtttcccaacagcccatgagatggtagaaaggatgaaatgatactattaataatgtacacacgcttaactcattcatgaccatccccctgcgctggcttcaaaccctgtgtccagcctgtatctcacttgattctcccagccaccctaggaggtagcagtgttggtttcattattcccactttacagacaagaaagctgaggttccgagtggggaaggaacttgtctaaggtcacagagctaaggagtgtcatgcatagagtaaaagtctccaatccagagctccctctgattcaccacctggggaagccaggggtgggcctagctcggtgcctcagtgcccacggcatggatgggagaggcccctcatcaccaggcaggcagagtgcagggcagaggcggatgactctagtctagactgtcctgctgaggctggtgatgggggaggctcgctgagccaccagctacagggagtctcagaatatctaccacatcagcaagaccttccagatctgcctgcaggaggcacctggaacatgcccacctctcaccacccccagagatctgccctgggccaggccacatcctcttctacctgaatgattgtagttgcctcctcactgtctttctgcttccatcctggcccgtacaataaaacacagtccattctccagattcatccatacggatcctgttagaacctaagccagaccagggcacttttctttgctcaaaacacctccctatctcccagcatactgaggacaacagccaaagtccttagaacagcccacaaggctctgcagggcctggcccctccgtatctctctggcctgatcccctttactcctccccttgctcactcccctccagccatgctggcctcccctctgttcctggagcacaacaggcatggtctggcctcagggcctttgcacttgctgtgccctctgcctagaacactccagccccatatataggcctgtttcctttctttgtgtctttcaggtctctgcttaaatctcacatccccagaatggctctccctgaccactctatttcaaatggcacccacaccccatgaataccagtccccttactcctgacattttgcatatatgcagtgatattatatatttgtctcttatttctttagtgttctccttttgcttctagaatgcaagctttaagagccacaggtctttgttctttttcttgattgtattgttgtgtccttcatgcctagcaaggggctggcatacagtagacacaaattaaagaacaaacaaatgagttccaggtctccaggcagactcctcaggactccgggacaacagagagtcctctgaaatgtctcatgaatctctctctccatgaaaggcaaacccagcattacaccatgggttgggcagtttatggccacatgtccaggtggctgtagcaacaatactcattagtcagtgtatttttgtggttgaaggcaaggtacactctgtttcctcaaggtagtcaaacaaacaccatgagaactatgtggagcttgaaggaaactgtgagctccaaactttcctgccagaaaaggaaaccaaggctaagagaagtaaaataccttgcccaatgtctctcaccactaagaggaaaagtcagccctcaaactctggtcttctcaccatgaagccaagaaaagatcctcagaggacactggcactggtgatttgttgttaagacaaccatgcagataagcacagccctgctgatcagggcctgagaaaaacaaggattctaggtcttccaaacaacaaaggtggccagtcatgcagcaccatgagttcagggtgaggttacaactcattgtcaatgtgttcctggaagacatccagagagctctggacattttctcctaaaagctttggtgagaggagagggaagacgtgtttggaaacattctctggactccattaaagcagatgttctcgggacccaggccaccatgtgcatgatgtcctgctgactcacctgtgggtctccccagttcggagaaaacacgtggccaaggctgggcaagaaggtctggatttcctgcacagcccttcaaggaggtggggggtagggacactggcctgaggacagagaacagacaagctggggaaccacttcacatttggcctgctaggccacgtgacatttggccgaaaccaactttggccaatgtgaagttctaagaaatatcttgttctgggatgagcacttatggtgtaacagtcctgcagagcattttcttccaaaaccttctggcctactgacatgccatggacttgccaaccatgtgagtctcaaaacataatccccacattctctgccattcctccatcaagagacaaggcttttgtctcttccctttgagtttgggctctgcaactgcttgttcagtagaatatggcagaaatgacccagtgccagtttcaggacccagaccttgagaaactggtatctttcacttcctgctcattggtatgatcactcttggaaccagatgcctcctgtgaggaaactcaagccacctcatggaggggaactgtcagacagcaacatctttccagccctgcgagcaagtgagccccagttgagccgccccggtggaggctgtgtgcagagcagaaatgaaccaggcctgtccatcctggcccacactgcagattcacgagcaaataaatgttttgttttaagccactaagttttggagggtggtgtgttatgtggctgtagagaaatagaacatcttcccaactgggaaggaatttcctgggccctgcaggaacccaatccagatgtaggattttaataataacagagaggcctggggttattttaaggaagaccaataaatcaggtcaggaaacatcatctgctgacttccctctggcactccctagccttgtcaatgagaatagctgagaacagtctaggagtcttccctatttgagatagaatcctctgctaatcaaacacacctcgggatcctctatggccagggtggaggtggcaaaagtggagaacaaatgttttcccttaattcaggatcttatatatttttcacagaatgtggaattacctggtggctatcgtcctacttggactatcaaaggaaataaggccgctctataggcaagcatcagaaacctctccttctattcctttcctgttttatttattgtgtggggctgccatggagatggagctgggaagagacaggggaagttcagcctacaaaatctttgtgaagctgggtgcagtggcgcatgcctgtagtcccagctattcgggaggctgaggtgggaggggtgcttgagctcaggagatcaagtgtgctgtgagctctggttgcaccactgcactccagcctgggtaagagaatgagaccccatctctttttttttttttttttgagatggagtctcaccatgttgctcgggctggagtgcagtggtgcgatctcagctcactgcaacctctgcctcccaggttcaagtgattctcttgcctcagcctcccgagtagctgggattacaggtgcatgacaccatgcctggctaatttttgtattttcagtagagatggggttttaccgtgttcgtcaggctagtctcaaactcttgacttcaaatgatccgcccaccttggcctcccaaagtactgggattacaggtgtgagccaccgcgcccagcctgagatcccctctcttaaaaaaaaactgtgaatgcctctttttgttggagtagggtttggactggttctttgcttgcttttcatcaaagtgggtttgtcatgtgattttaaaagtctctaaaactctgcctgccaaagtatccatctgtcttattttatgttagctagaacaccccaaggggccaggatggcaggacaagctccaaggggtgatgtgggcaatagcagtcaatgtctgctctacacttgatggtgcacaagagcttttattctcatgatcttggaatatcctttcaggaatccagtgaaggtgactggacaaaaactatggtatgcctgtacaaaggaatactactcagcaataaaatggagtgagctactgatgcatgccacaccatggacggacctcaaaaccatgatactgagtgaaggcagccagatgcaaaaggccacacactgtatgatgccatttacgtgaaatgtcccaaagagacaaatccatagagaaagaaagcagcttggtggttgcctgggcctgggtgaaaggggtgtggggagtgaatgcaaattggcatggggtttcttttggaaatgttctgaaattggattgtagtgatggctgcacaatgctgtaaatttactaaaaattattgaattgcacacttaaaatgaatgaattttatggtataaagttccataaggctgtttaaaattttttatggtataaagctatttaaaaaaaaaaaaagaacagaggggagtcagagggaggggacaaggggtggagggtggagttgttagagcttcatggggcataggagataaatggatatgtactggctggaaaggatagaagctgtgattttcttagtcacctaactggggaaatcccagaacaggaggcctctgagttcctactagctgacaagtgataaaagctgagagtaataatgacaagtgctaacactgattaagtgccaggcacatgccaggcaactatacagagcatgttacaggtatgaacccatctgctcctccaagaagccctttgaagtggtattgggagataattctccatgggtctctccaaggtctgcatgtcttcagctcaaaagacactgagacctttgttctagactatcatctcaaggacatctgtgtagcaaacacacttggaggacagagacaatatctctctctggagcagaaagaagaggatagagttgtttcccaaccagtacaataatgtctctatctgaggcaaaggctagacaggtttggcaatagcccctttataagattgcaggtttcctaagctctgggatcctccattgagacacagatctgctgctgtgtgtgcagaatccatttgggttgttttcattgctctcatggaacttgggagacaattagaactgacgcaaatatgaagcttgtgctgcttgctatactgtgactaataaagtcctttgtctctgacctgggatctcgtgtcttctgccgtcatgtatggcattgtggcaggctaactcattagcttgtgagcagtgcaaaatctcggacccttcgtagttcttccgtcatactcacatcacccctgttttacagatgaggactttgaggcccagagaattgaagcttcttgttcaagatcacacagctaacaagtaacaaagctaggactgttacccagaccgattgggaaaggaaggagagatgagtaggggattggagaagagaaccgctggaaatgacaggagctgaaggccccaaaggtacacagaaggtcatgcctctcagcttcccaaacccacacacccccagatgctgcctgtccctacatccggctgctggggctgagcagccaatttgggacgaccgtgatatatttaacggtgagtcatgctctcccccagcaatcagcagtggcaggctcgggaggatgcagggagcatctctggaaatccgtgcctgagggtcgccatgacaacgccatctgagtcgcttgccagcagctgggatgccagtgcctgaaccaaggcacaaaatagtctcacaggctgagtgcggccgaggacaggagcaggccccctgcacggcatccccaatgggtttgccagggattgatgggagggatgtgaggacttggtgacaagggagattcatgggctcactgtccaggtcacagtactctatggaagcctggggtccctggctggtgggaatgagcacacttggcgtgatgggtattttggtgagcaccatctcttcctgccttggttcttcttggtttgtctgtctcatagttgctctcccagaggccctgcccaatttgaggcttctatccaagtgtcacaacctctgaagactgacagcaacttgggaaggtaaccaagatcatcttccaggataattctgaagacttcagaacctagggcgaatcagccacacccacacactaacaccaaatacgaatatcccatgaaagcagcttggaatccattcattcattcataaatccattcatcaccttgtcctctcagttgttcattttaattagaacctgggtcctacaggccctatgtagaagtggatttggttatcccgtcctcatcccctttcactccccctctcttattctactctagctcactagtcttactgctgttcctcaaacatacagttgcttttctgcctcagagcctttgcacttgctcctccatctgcctggaaagctcttcccccagaagggaagctctccctttaggtttctgctcatatgtcaccttctcagagacacactaccaagaccaccctaggagaaagcacctaattcagcctcagtgataaggccaaatatatatatatatatatattatgtataatatgacatatatctgtgacttagtttcccccatccgtacgaagcaaagagagacaagctgaaaattggtggcctgtaagttgaatctaactcacagacctgttttgtttggtttacatagtgtttcaagaactgagcaagttgctaacagttataaagttgagagattttgttttagaatgcaaattttcaatttatctcgaaaaactaaggttgggtgtggtggctcatgcctgtaatcctagcactctgagaggctgaggagggtggatcacttgagcccaaggagtttgagaccagcctggccaacaggacaaaacctcgtctctacaaaaaatacaaaaattagctgtgtgtgggggcatgtacctgtagtcccagctacttggaaggctgaggtgggaggatcacttgaggctgggaggttgaagctgcagtgagccatgatcatgctactgcactccatcctgggagacagagtgagaccctgtctcaaaaaaaaaaaaaaaaaaaaaagaaaagaaaagaaaacaaagaaaaatattaagctgtgcattctgcatctgtaaaagcaactggctgaggcatgagcattccagtgccaaaggccctatgtggacctcttcattcatttatgtggccatgttctacctatgggagtctttgggcttgcagcccaagtctctaatccgaggtctctaagggtctttggtttgggatggaaagagtgtggcatagtggttaagagtcaggccgatggggctgcaatcctcactcacttcagtgttcacagcttcagtttcctcacatgtagtatggaatctcagagagttaatgtgcgaactgaacaaaacaatgtacctggaaaaatgcttaacacagagcctaggaaatagaacacaataagtggaaacttaaaaaagagctttttctggcctttaatgacagtccattccttgatctgactcactaggtctcttcgatcagaaatttgggagacaaggaagggctgttttgctgcaattcacttgatgtcaaagcaggaaagacctcggacaaagcttcaagtctaaccttttttgttctcgggtgagtaaaccaagaccagaggatgagtcttgcccagaagagtttctaaccattcttcccccaggtatttgtttcccggtgaaatttgcttaaagttggaattggctgagtgtgggccagagctatgggcattgttgtgaacacttgcttttaactgcccagtatctacttgctctttatctgtaacagctccctgatttttccctggcaccatccctcttctgatccccaggaaatggctccaggtatgggcatgtggttcatgaccacagtggttggctcagagatggccatatgatgcaatccaggccaatgcatgtcaaccacagagctcttaggaactactggtacccactggagctgctgggctggttagatacaagcctggggctgctgagagccatttttgctatgacttggggagctgcctgcgaggatgccaacacaaaggaaaaaaggtccaggtgatggaggaaaacagaaaccttagaacataatttgagcaacttgattcagctgagcctgaaggcgtgtacccctgggcttttcagttacataagccaatcagtcccttctgccttcctctttttttgctacgatcagttagaatcaagattctggattcatccaggcatggtaggtgaaggtgttgggtaagcaaaggcccagaagcaggaaaatgcagaacaagttctgggatttccaatgaataacctgcagtgggaagaggccagtaaactcacttaaagccagaacctggggagctttgaatgccttgctaagtcactttgactttatcctaagggtaacagggagccatgggaaaggacctgccagagttggcaatggtgtggggcagtgggagtgaggattattctggatattaagtctggttcagggttctcctgggatccaactccagcccagagtgcatgcagtggtgagagagggtgtcttccctcagcacccgcagcttccagtccctcctgactgtcttataataacagtgttttcaatgcagaccttctgggttccctgccgcgaatcactcagccacccttccagggagaaaacaaaaagcagtgtttttccgtgtctattttaggctgctgcctacatctttgttcttcgtgaggaacacacactcccggggggcccttttctcagctgtggcccagcagtcgggtctggaccaccaggctgggttccgttatgggaaagaaccagcagatgtaatggaatcatgccaattaggccaggagctgcgtggggatgatgttatcattaagttccagaagacgtggaggtgagggggaaggtagctcattcccgtccacatggctatcccagacggactgccttttttgatctgtccccttcgactatcctgagcagctaggaagagcccacccttgctatcccctgagggacagaatttagaagtctgcattgtatgagacacttgtgctcattttactgttgggctgaaagcagaagtagaaattctatggcaaatgggtggatccagcccacccattttacagatggtaaaactgaggcctgaagaggaagcatagtttgttcaggtttatagaacatttggtggcaatctatgaccaaaaagaccagaacataaaatctcagagggcatgtaccttatctgtcttggtcaacatcgtgtcccatcacaaaacatagtacatggcaaataataggcccttgatatacattggatgaatgaacaacatctctactgctgttttcagctttcacaaagaattctctcacacattccctcatttcaacgtcatgattgtctttgtagccaagaattgcttttgtccttattttgcaggtgaggaaatggaagttaagagaggcttagttgcctatccgagatcacacagcctaggtagagactgaatttgaatccatgtcatcttgatgcaggctggggcatcacttaaattttggtagaggaagagaccttggaaatgtccagctgggaggtaaaagccttggtctacaaggacaactctgactttaattatactacaacatttggagtgaggggaacaagaaagcaggtcctcaaaaatgttcaaaagagttaccatatgacctagcaagtccacttctaggtatacatccaagagaattgaaaacctatgtctgtgcaaaaaattatacattcatagcagctttattcataataaccaaaaagtagagacaccccaaatgttcatcaactgatgaaagataaataaaatgtggcctatccatacaataaagtagtattcatccataaaaaggaacaaaaacggatacaagctgcactgtgggcgagccttgaaaacattttgctaagtgaaagaagttagtcacaaaaggccccatattgtatgattccatttatgagaaatgtccagaataggtacacctaacgagacagaaagtatagattactggttgccaggagatgaggggaggaaggaatggggggtgactgttaatgggtacagggtttctttttggggtgattagaatgttctaaaattagatgtgatgatggcttcacaactttttgaatatgctaaaaactattgaattatacattttaaatgggtgaattttatggcatttgaattataccccaatcaaacccttaaaaaaaataccaagaggagcatttccatggcaagggagttttagaagggggaacatacaaatgaggaagggtccccagcatggacagctccatgctgtcttcttggatgtcccaggaagaatttcaagaaagtatttcaacccccagctccaaggattcacctgagggcttgttcctatggagttgagaatctgtaggatacctcctccaggtaactctcccagatatcccaaccacagacaagaaaatgaactcatgataactgggcaccactcagtgccctggtgctctgcttgtgatatctcactgaagccatgcaacaaccttgctgaatgtgaggtagtaccatcacccttgttatccaggtgaagaaatggaagctcacagagataaaatgacttgtctggggtcacacagcttttggctctctcagctacatcatagtgcgtgggacacacccagagtaaggcctgaggccactttccgagggaacccaagcaagttccttgacactgtgggccttagtttccccatctgttccattaaatcccagcttactccttcattgtcctggtgggggcttcagccagagcatcaccacctgcctctgatataatggtgcttcacatttcatcagatttcatgtgaacaaagccaaacatcttttctcagtgcctcacctgcccagggatcctagtccacatctatgctgtttttctccactctgtccttccagtgcttggcacgctgtgccacttctcaaaaaaccctgatgttgcctgccattgggttcaaggcagatgatgtgatttcacaggctttcttcttcagcactaaataaggtgcttttgtggggcccttcctttacttctgatgctttaggttcaactttggagtttgtagacttgcagagaattttccatcaaagcgtacaggcagagatgcaaacacacacccttttatatctccatccatccatccattcattcacccatcaatccatttactcatccatccatccatccatccatccatccatcatccatccatccactcatccacccatccatttatccatccatccatccactcatctacacatccaattgcccatccatccacctactaatccatccattcatccactcattcatccatccactcatgcatccattaaatcatatattcatctactcatctatctacccattcatttattttcccatttcctttattcattcattaattcaataaatatttaccaaaagccgactatatgccaggcaccatgttggccaatggatacagtggaagaaaagacaaaatgaggttcttctcctcatggagctcacagtccactgaaggaagataggcctcaatagacacacaaaatgtaagcataaattgggatgaatgctaccaaaacaaagtccagaatgataaagatgcctaatttccattgggagatggaggaggcttttctgagaaagttgacatttaagatgagatctgaagtatgatttatgatttatcagttaggaatgctcttggtttaagaagtagaaaatgctaaccaaaagaggctccagcagttagggttatgatcccacataaccaaaagtcctgaaatagggttaccccatcactgagggacttgacaacatagttaaatatccagactctctaccatctactctaccaccctcagaggactggcttcattcccaggctggcttacttcatggacacaagatagctgcctctgctctggccatcaggtgaagacatgcccacattcatactcagaccatcacgagcaaaaggaatggggccaccatgattgtctcagatcagctgtttgcaactggccctgattttgcaccccaggggacgtttagaaacattttcagtggcataattatgtgtgtgttttgggggcattgctactggcatcttgtgggtagaggccagggatgttgctaggcatcctacagtgcacagtacagaccccatgagagataattattcagatgtcaatagtgcctgctttagaccagttagaacaaaatcctgagtcatggggcacacagtagaaaggcgtaggggaattgcttaagaaagctttcctggatgatgtaacagctcaactgagtcttgaaagatggacactggttaataaatccaggtaataaccagctggccacgtggatgagcaaaaacgcagcccttccctcttttctgcctcttctagtcgatgtgagccccatatggtcagggacctcacctgacccattcacttctccatccccattcccatttgatgcccattaccatagttgttcaacacattgttgtcaaagaatgagggactaaaatggggagaaaccctctctggaggctgaagccccaactttgaaaattcctgggagtcacacagagtgaatgttgggggcaatgactctggaataagtataggaggatatcagtcaacatgaggaaaccccaagaaaacatttggttcagtcctatcattgtacagatggggagactaagacacacaaaaggggagaaaatggttcaaggtcactcagaaagggggtcagacacagccagaacccatgtgcccctttcttaacccgtgatcaacagcagctggtggatcctgaacaattgtttagagactcacggtccagctgaacacagttccgagttcctgaatttgggcgtttcccacctcttatctccttagaaagctttcttcctggattcacttaccttgggaccccagaaggatgctgagtggggccaccttctgtgagtgtgtactctgctcagatggcaaaatggctaccaaactgcccaacccaaatggccggttcatggacacgttttgtttggtccatgtttgtttaattcttaaaaaaaaattattatttgcattctttgccaacaataaaaataattgggacagtgtgccttaatccaaatttcccacttctcttcggtaatcagaaggtttgacagcattgtgcccatttttctgcatggcagctatttacaggagttgggcagtggctgctccttttgtcaggatacaagtgccccatttcatcccagtgccctcctggctatatcactcttgtacagggctgcctggccccagcccagctgatgggacacaggcgtgagtagtgaggccatgcagggaccacaagcaggacactctccctctctcttggaaggaagcaccttggttaccatagcaacatgctgctgtttgtaacacatcttccacctgaaaaggagaggagatgacaagtacatctctcttctcagcccaggcaacatcagctcctggcaccccccaaaacctaagagcgagaagggggagtgtgatctgtcttctccaatctgggccccaaatgcagatgccccaaacacccccatttgttcaaccaacccagagatgaggcgttgggaggggttgatttagattccatcttatataaaaagaccagaacatttttgattagtgatggaggaaggtgtgggagtctgagacagtgctttgtttctgggcaaatgtacacattccctgatgcctctcttctctccacgtcctctaaagtagaagcatagactccctctccttactactcctcacagccaaattcccctcagccaggaccccagacctttcccaatacccaggagcccctagggcagcaggcctgtttctaggctacctacagaacctgaaggaaataagggaatgaaataagagaatcagccagaaataaggcagggcaccgtgcggtattttcctttgaaactaagaggctgagagctggaacagcagcagaaatcagaagaaatctcattgagaaaagaggcacagagaggagtgccaattagcacccaggtcccctcctgggagtgtcaatccataaatattaataaccgtaatcatccagtattagttataatgccttgtaaattaaggtcattttccgtggagtaaatagctgcgttaatggcagcaaaaggtaacggcgttgctggctgcatgccagttgatgcctgccaggatgacagtataaatcaggaaggacacgtccaatctgtgaagacaggcagtggcatgggggcaggtggagtgacggggcagagtgtggccgcagacacacatcccacgcaaggcccttgggccgatctgatctaacagggacctgctttagacaggtgatgtctggggcagatgaagctcccagggtcactaggtgtaggtaggaggggagagaaggggccgggtgggtagggagagggtgtctcagagggaggtggcaccaagacttcagacacttgggttaagagcagagggccacgctttgagctgctgcctgtggcatttcactgcagaccttggcgcctttgctaagcgacacagacattctcttcttcctctacctcctttccctcctctccatcttccttctcttcctctcctctcctcctgccagggctgacttctccattaggcccaatagacacagcctggggttcacactacctctagggccccttctccaatgttttaatttcttttataattagaagaaaaaaagaactttcagcaggaagaaaatgttgtaatactgtatgtgatattaatatattcatctttataccaatgtagccataatatagcatgtttgtttttttttcatggagagaggcctaagtgcccgggggccacaaaattcatcacatggccctactttctgctccccacccctcctcccactaaccacggggccctaagcaattagcattgccttatggagtctcggtttcatcctttgcaaatgggctaataatggtgatgccttcccaagcaggatgaagtaaaataatattagaaaaagctttggccacaaagtggtgtttgcctccttttcaggaggctctgggatcctgggagttaggcgggtgatgtatttgaaaatctcagtggatggagtccctggtaatgctccctatgggctccccaagctaaatgcaccgtcagacccttctctcgggtctgacccatcatcttcctgggctccctggtttctctaaagagcaaatgcttttcttgaccctctgagaaaactcacaaggcacttgagtatactagatggatcaaataatgcctttaaattccaacggaaagaaagcagccattatgacgggctccagcaaggggagggagttgggggcctccttgttcctttactgctgggactggacacactggggtttgcaatacccagtgcagatgaaaatgtggggacccttgttcaaaaactatggatttcatgacagtgacagcagagcctctaacaaagtgtggggcccttctgagaggggcgtctggtactactgcactggttgcacacccgtgacaaagcctgttgttagcttgcagctgggaggacgggtgtggcagtggccggggaggggacagcagtgatgatgatgctgtttgatttcccccaactccaccttcacctagtacagtgcctggcatgttgtaggtgcctaagaagttctagttcattctctcattcccctaacacagggcccaccatggcagatgaggcctgtccccaccagggtggaagctggatcactgggcccggcttggcacctggtaacgatccctctccagggggctgtgccctggatcctctctctcctccctcctccaccttcccccagaaagagtgatcctttattttactcctggcctatggtttttgtgttggcagaagtggaggtgcttatggccagcatagcctccaaactaaacactgcagaagtattgagtattattattatttttattatctaaatttgcaaactctgccccctcctattactcagctccttccttttcttctttacttttcttcactgcccttgtcccctcctgatattatagtgcatatctatctgcttgtgtgctatctgtctcccagaccgaagggtggactccacgaggacagggactttgtcttattcactctggaaccccagagttagcacagggctcagcacatcaaagacactcaataggtatttgtagaatgtacacacaaatcttggaaaggtgggcagggatgctgtgtgtcctggggccaggaagccacctctctgagtctccctttcctcacctgtaaaaaagaggtaacagcagctcttgcaaaggctgaggagcagatgaaaggaggccacaccctgcaaaggcactgtgagctggtgagggagtgcagcgatatcacagttcctagagcccggcctgcaaatctggccacagctgccagtcaacagcccaggctcggctaaggtgccataacttggtgcccaccttggattttcacacccagctggctactggccaccagatggcatagaaggttagtccaaccacctggcctgacctgggaggctgcccagcctcagagagcatccttcctagcgatcacctgggctctagacctcagcctggtcctggcctggagggcggtggagggggctcagccattcagactgctgtgtggactctcacctgacagcatgtcattcaatccactctgtcaagaaatactatgataacaatcagggaaatgcaagccaaaatcacagtgaaataccacttcacacccactaggatggctagaataaaaaagacagaacaagtgctggcaaggatgtagagggactggaaccctcatatatagctggaggaaatgtaaaatggcaaaatcactttggaaaacagtctgggagttcctctaaaggttaaacatagaattaccatatgatccagcaattccacttctaggtacataccaagagaaagaaaaacatatgtccacataaaaatttgtgcacaaatgttcatagcagcattattcatgatagcccaaagtggaaacaactcaaatgtccatcagctgatgaatggataaacaaaatgtggtatatccacataatggaagcttattcagccataaaaaggaatgaagtactgacgcatgctgcaacatggatataaaatcttgaaaacattatgctgagcaaaagaagccagacacaaaaggtcacttattgtgtgatttcatttacatgaagtgtccagaatagggcaatgtagagagataacaattaggttagtggctgcccagggctgggatggaggtggggagagatggagagtgactactaaggggtaggagtttcttcttgggatgataaaaatgttccgaaattgattatgatgatggttgcaccactctgtgtatgtactaaaaaccatcgaattgtacactttaatgggggtaaattgtagctttaatttaatgggtaaattgtacatctcaataatatctcaataaagctgttatatgtatatgtgtgtatggatttgaataaaatgcatttgtaaggcatctaatatgagccaagtgaagagcacaaaatctctgcttgctcaggaagctaaccatgaagagacagaggaacagatacaagtgcaatttgactcgaaatatgaaaagcgcaatttgactttaagaaaaataaagcgggctgggttagggttggccaggactggagttgctttagatggaggagaggcactgtggtccaaggaagacacactgaggaggtagcttttgaacagagacttgaatgaagagattgggtggggtggggcacagaaattgggtggaagagtatttgcaacaggagaaatagcaagtgcaaaggccctggggtgggagcactgagccagaggaagctaagaggtaaggagggagaactgatgggggctggaccctggagggccagggaggttctgccgagacccatggcttggttctgagtgaagtgggagccgtggagggctttgagcagaagagggacatgctctgacttaggtttgcaccaaatctctctggctgtgagtggagaatggactgtggggtggatgtgggcaggatggaagctgggagaccagtgactaggctactgaaatagaccaggtgagagacgaagggggctcggccagggggtggaggcggaggtgtgaagtggtcagatgctagttgtggactagcaattctatccatggaacctccacttgcagggatttttattgccatttaacttgacccagatgtcagctgagatcaaaagcttcctacctgatgaacagtctttgaatgcctcccaatcgccaaggtcaatcacagcccctccccagaacgctataaatgccggggtccttgcttcttctgtcccttgggttcaaatgtcctgaatccatctggatgctgtctcagcctctgccaccgatttccatgagaaactcaacccatcaaacatgttatcattctggcagacttaacagaagagtcaatagtagtaaacaccttgtaagattcttctccaggttagatgagttaatgtatgtaaaagcacttagaacagtgcctggcacatggttggcactcaatgaatgttcactcctattatttatttattttcattttagattcagggggtacatgtgcaggtttgttacacgggtatattttgtgatgcggaggtttgggcttctaacgatcccatcacccaagcagtgaacgtggtacccaacaggtagtttttcaatccttttccccctctccctcccctccttccccttttctggacttcccagtgcttatcgttcccatctttgtgtccgtatgtacccaatgttcagctctcacttataagtgagaacatgtggtatttgggtttccgtttctgcattaatacacttgggataatggcctccagctgcatccatgttgctgcaaaggatgtaatctcgttcttttttatggctgcagattgttattcttttagagacaggatctcgctctgtcacccaggctggagtgcagtggtgcgatcatagctcacggcagccttgaactcctgagcccaatccatcctcccgcctcagcctcctgagtagctgggactacaggaacgcaccaccacaccagactaatttttaagtttttgtttgtttgtttgtttttgtttttttttagagacagagtcttgtgatattgcccaggctggtcttgaactcctggcttcaagtaatcctcccgcttcagtctcccaaagtgctgggcttacaggtgagagccaccgtgccccgtcctggcttctgttattatcacgtggctagcgtaaggggtgttgggtaggtagctccctttctgggaaacattggccccatccacccacatccgatggggctctcccatttcaacaggtcttaagaagccatctcctcaacaaaagtgggcccctgggaggaattctcctgacagccactaaaacagtatgcttgacctgcatctcataacgcatccaggaggaaatgaaagcacagacagctggagaaccaggcccaaggtcacaaaacttaggtgtagcagagctgagaattcaatgtgcatttgatgctaagccaggtgataaaagaaggaaagccagttttattgagtgcatgttatattccaggcatctttgtatgcactgtgcttttatttatttatttatttattttatttaatttattttttgaggcacagtctcactctgtcacctgggctggagtgcagtggcgtgatctcggctccctgcaacctccacctcccaggttcaagtgattctcgtgcctcagcctcccaagtagctaggattacaggcatgtgccaccacacccagctaatttttgtatttttagtagagacgggggtttcaccatgctggccaggctggtcttgaactctcagcctctggtgattggctcgccttggtgtctcaaagggctgggattacaagcgtgagccactgtgctcagcctgcattgagtttttaaaaatttcactttttatataaattatattaattttgaagggcagtacctgcacacagtttgaaaatcaaaaaggtacaaaagggtacacagttaaaaagggggatcttcctcccgcccctgtcccctgtcaaccagctctctgcctcagaagtgactactattttgtttcttagggatctttccagtgacggactaggaatggcagaacctactagttgcccacccagtatccagcctccacctcctccttgctaacagaaccccaattttgctcacaggtggccatatgcccagataaaaacactcacattcctgactcccttgcagttagcagcagccatgtgacctggtctgtacagcgagatgtaggtggaagtccctgggcagggaatttcttttcactccctcaaaagtcaaagtgcccggaaaagaagacttttgtgtttttgttttgcttttgccctttgcccttaaaaaaaatttcttgcctgggtgagactccatctcaattaaaaatatatatatatattctgcctggaatgtggacttgatacctggaggtggaggagcagccaccttgagaccgtaaggatcagagacacgtactcagaatggggaaaggaaagaacgatgcttgagtccttcagcagctgcaccagtgctgcgctgcccggctctggacttactgtgtttgctcaagccatcgtctgttggatttttctcatccttgcagctacatgccttcttaactgaaaccgtgcctaaataagcatttgtatttatctatgttctttcttccccacaaaaacggtagcatatactccacctacccttcaggatcttacgtcttcacttaacaatatatcttgaaggttgttacaaataggtacacacagagctgccctgaacttttaaatgaatgtgtctaagaccttgtacagatgctccctagagtgttccaccaagtccctcttggtgtgggtcgttctcaacttcttgctatcacagataatactgcagagacaaaacagggacattgttcatatcccacatgtgagggtttgtcttcagaagaattgctgaatgcaagggcagatgctttttcagtgttcttagattttgtcaaatttccctgcaaagaagtctggctgacgtgcattccaccagcaatgtgggagtgtacccacacgttgtctctaatcctttcaacaacaaactagatggtgtccattttgctgaggctcagagaattgtacatggcctgcccaaagtcatcacaggcaactggtgagatggggatttgtaccagggtctgtctgatgtcaaagctgtgcttgtaaacacatgacattgcttttcaggcagcctggattccagagactctcagaaaagagggaagaacgaatctgacccaggcgctggtctgtacctgagaagagcctttgggctgggctgtggggaggcccgtgtttgtcctgggccgcgtcccagctcaggtctgtcatggccttgctgtgtgagcaagtcctgccccttaccctctctctgggcctcagtctttccacctgtcaaatggatggcttggagttgctggttcctaaaatcctttaatgttaggcttcttgaaaatccccaagtctgagggtatcttgggagctgcttttcagacctcaaaatggaaacagcgatttttcctctattcctgaccgagcagaggtcagcagcgtcaggggcatctacttctatctgtggactgaggtcacattccctgggggaggctgggccatggtggggcagcagtccgctgccctgttttctctgtagggtacatcttctcccagctctgacagccagattctgaggacaaatattccagttatggtttcagatactgagtattttccaaagtgatttacatatctaatctggaagagaggggctactcttatccccattttacagataaggaaacaggggcacagagagatcgatcaacttgtctgaggtcattcggccagtaagcggcagccaggatttggccccaggaagtctggtgcaagaatctgtgcccttcaccgagcatttctcaacctcgacctattggcgttttgggttggctcactcaggtagggggctgccttgtgcattctgggatgttcagcagcatctctggcctccacccactagatgccccctgggtatgacaaccaaaatgacccagacattgtcaagcgtcccctggaggtcaaaatcacctccagctgagaactatcttaacacagctctggagatgtggattctaggcccatctggggactcttgggtttttttttttttttttttttgagacagagtcttgctctgctgcctgggctggagggcagtggtgcgatctcagctcactgcaacctccacctcctgggttcaaacaattctcgtgtctcagcctcctgagtagctgagattacaggcatgtaccaccatgcctggctaatgtttttattttttgtagagacggggttttgccacgttggccaggctggtcttgaactcctcggttcaagtgatctacccactttggcctcccaaatgctgggcttacagatgtgagctaccgcacccagctgattcttaacccttctgagcctgcttcaggctctggaaagacactgacaaaggcctagagaagaaccttgcaagagggcaatgccctgtgcaggcgatagaagcgtcgcagggcagccttctctgaggctggcgatgggacaactcagcgaggggcattggcgggcagcaaagaaaaagcttgggtggtggaatgggcttggaggttggctgagtgaccttaggcaagtgctgagattctctgaccttaggcaagtgctttagattctctgagatgcagtcttctcagccaaaatcagagttaacccttgtagagttgaggtgtgatacttaaataaagtattgtcatgatgggtgaagaaaaacaaaaccaaaaactatatccacgaagagtctagttaaataatgtatggtacatctaagccatgaaagattatgcagccattaaaatgaatgaggtaaatctagtttttgctgatatggaaagatctctaaggcttatttatttatttattttttgagatggagtctcgctctgttgcccaggctggaatgaagtggcgcaatctcagcccactgcaacctctgcctcccgggttcaagtgattctcctgcctcagcctcccaagtagctgagactacaggcgcacgccaccatgcctggctaatttttgtatttttagtagagatgggtttcaccatgttggccaggatggtttcaatctcttgacttcgtgatccatccatcttggcctcccaaagtgctgggattacaggtgtaagccaccgcgcccggtggcttattcatttattaatagttaaaaagtaaggtacccaacagtatatatgacataatcccattggtattagaaataaaaataatctttctacatagccttattgagcacctactgcttgccaggaactggagtaagcaggaggaatacagtgtggataaaacaaaactcctatttccatggaggttggtgcaaaagcaattgcatcaacctaatataaagacgtgcaagaaaatggcttcttctgagcctggagatgtgggagtgagatttctgtctttccattgtatgccctctggtatttgaattagtcttactgttgaatgcatttatttatttatttatttagatggagttttgctctgttgcccaggctggagtgcagtggcacgatctcggctcactgtaacctctgcctcccgggttcaagctattctcccagcctcccgagtagctgggattacaggtgtgcgccacctggctaatttttttgtatttttagtagagacagggtttcatcatgttggccaggctggtctcaaactcctgacctcaaatgatccacccacctcagcttcccaaagtgctgggactacaggtgtgagtcactgtggccggctgaatgcatttattttaatgatcagtttttaaaagactggattaaaaaaatgagagagaaagcaacgagcagtgtttggctcaatgcaaatggttgcttttattattatcatagtaataaaacatttattaactgtctcttgagcacctactgtgtgccaggtactttgctaggtgctgaagatacgtagtgagcaagaaagataaaaatattggtcctcaggagcaggtgctctaggtggggggacacaggaatcagagaagtaactgcaaatgtcattagtgttacaacagttggggattatgatggcatcggaacctaacagaggggaggcttgcaggtctagggagttgcccagggatcggagcctgggctccagccctctatcctcaagcctgggcagttcacaaggttggacccctccatggcttcagagcaaacaaaaacagctaaaattgatggaatacatacagccaacaggcacactgtaaatactttacatgtattaacttacttagaatccttactacaaccctatggatactatttttatgctcattctagagatgagaaagtcaaggcacagagagattgagtaacttgctgaaggccacacagctagtaggtggcggaaccagaattcaaacccaggtattctgctacagatgccatacttataactacttcctttcatgactttcttctcctcttccctgcttatcagagccagtcctctgtctccctgtcctccccagacatgaggatgaccctctctggccccagctgcagcagaacatgcaaggattggaggacactctccaatcttcccctgtcccaggggctcctaaagtgtcctggttttgcccttggagcccaagtagaagaggggacgagggggagcaggagccagccaggtatacgctggtcccccgtctgcctgtccttcaggcataagaatctgggttactcctagagcccaagtgtccagattgattctaactccagcccctgaatgagccacaaactgagtcctaacccgggtcacactgaatcttgaccctggccgcacattccttcataaccctggtcctaggctaagccttgaccctggtcacacactgatccttaaccctagttgcatactgatccctgactctgatcacagactaactcctagtgtgatctatgacccaggtcatgtactgacctcagtctcagactgaaccctgatccttgtcaaggataagccctgaccctcatcacacactgagtcctgaccctgctcactggttgagctctgacgcaggacacagactgagctttgaccctggagagacactgagtcctggcactcctcactgactgatccctgatcctggccatagagtcaaccataatctggtcctagggtgaaccataatctttgtcacatattgatctctaaccctagtcatacactgagttcagccctggcctcagatgcccagccatctccaattgctgctgtctactgcccagggattcagagactcccagaatgccctcttcccacctttccccagagcttaaagtgattccactggcctgtgcagaggtcacccagcctgtcatccccggggcccatctgggggacctacagggctctaaaaaagacagggaaggcatgatttagacagagctaaattctcgagatgctgcttttcatctagaggctcccaaactcttcctatttctctctgtctcgtctcttcccccattcacacacatatttctcctgaaacaaaattcatcagcaaattctgtctttaagaagggaggtcagacagcagccagcccagcagctgggcagaattctattatcaggaggaaatgcagccagcaggaaggactgtgccctccctcccggcaaagtgttactcactctccccagcttggcttccttctgaagggctgtggagttcctgacaggtggaggtggtggacgtctgctgatgttgaccagggagcccgtgctcccaccggtggctggctgccccagacctggcccctgttctgggaatctgccccagtgtctgagcaacacaggggtgaagagtttgaaatggttccccaaggtgctttccaggattgcagggcctgggtagggccttacatattgggagagtccttgtggcctctttggggaaggatgtttcccccttaagacccctgaaaacaggggtgcaggatggatgaggaacacagggctcaccctccacccccatctccaggcagtgcaaacatgtgaaacatgaacacatgggcaggcgttgaggtttccactcagttccccctccctgctctggcagggaaaggacttttgctcctctgggccagggagccctggagggaggggagaggcatggttgctgaggctgggtgggggcttccagatgggtgtcacccatgcccttccgaccatctaggacagcctgggagttgtgtctagttaggagagtcaagagtcaagtatccagtgagctggtcattcggataccgaggtgggaaacaggtgatcagcctgacagtcatcttgtcagttagacgtagagacaggcagatgggcaggccgtcactcagccatttgatcaggcctgcagtcagacaagcaggctgacagacagacggtcagtcagtcagaggaggagatgaacagacaggcttcttcatctgttagtcagatacaatagatacccagcagacagacaggcagacagacagacatagacagacagacagacagacaggctgtccatcagccatcttgtcagtcagctatagagacagctagtcagtcagtcagacaggagatggacagctagtcttagttactcatctaattacagccagccaaacacccaggaagacagacagacagacactccaacaggcatttgaatgaggagatggagagaaaggcaatttgttttgcatctaattagtcaggtacaagagccgcagccaggtagacagggagagagtctctctgtctcagagagggacattcagtcagacatggaggcaggcaggcaggcaggcaggcaggcaggcacagccattcatccagtcagtcagctatcctgtctgtcaggctctcagacttgcggtggacaagtcagtcagtcagtgtccgtcagaaccaacctaccttctggccagtgatgcagctggccattatgacagacatccaggctgggcagagacaaacactggatgctatgaggaatgttaagaaatgggggtcctaagctcacagaataaccgggggtcccaacacccctctcaagagcctgatacagcccctcaacaatcagggaaagcattctggaagaggagggaagaggcaccccactccaagagccatccctcatctccctctgaagtgcctggcctccctctacaggccacaggcctagagaaggagctgtgtgtgtgtgtgtgtgtgcgtgtgtgtgtgtgtgtgtgtgtctcagctctgccaagttctcctcgcctccctcctccactggagtgggggttgggcggccctcccaggccacttcccattttgggaattgggctgagaactatgcaagagacagaaataattcctttttcgagcctggccagggctgtagcagcccaaacattggcacaaaaccagtgctggggaggggcccaggagggggcagccaggggtgggacggagccctggggcccagggacacaaaggcctgggtgtctccagaagaacctcctcatccagtcccagggctgggtacaggtacctggaagattcgagactcttagtggagctgccaggccagaaaatgttcgggattggggaggggaccaggttacagaaagaacaagaaagaagtcatagagtctccactggtaaagacaacttgaaaaatggaccatttctggtggccaagaagggatccctgctctctcctgagaacacatcccccgctatgggcagacccactgagcactcacataagagatggtggcctgggaagcacctagcacacagtaggtgcacactaaatgcaagtgtccttggaccagaatcgtacacaactagcttcgcagccctttggcactgcttcctagggtgtgaccctaggcaagtgacctcagctctctcagcctcacatttcccctctgtaaactgggagtaatggcaaaacccgcttcccggggtggctacgaggattaaatgacatgacaggtacagaaaatctagcacctagtaggtctgtgatctatttgagtccttcctcctttctttccttctttctcaaagcattattttcatctcactggggtcttacagcaatcagccaaggcagatcttgatcgtcattttccaagtgacaccctcctgaaatcagcccgtctcttagcctcagtgtcccccttgtgtaaaatgatagctcgggacaggagatgtctggaaagccctttcagagcctcagcgctagagtcgctggtgatcctcaatgcttgattgcatcattcccagcatgcaggggcccttcccaaccactccgtggggatccctgtggttctgaggaagctgaccctgccccctgccccagggataagccagtcagcacatggcatcccccagctagagagcttgctgagtggggcatgtgattcaagctaagccaatttattgacttctgagctttggccaggaatgctgggagttcccttctcttctggataacgtagagtgcatgtgtgacgcctagaaatgctgcagcctttgggactcccatgaggggagccagcccaagagaaaaattggctcacagaggaggacaaagcagagtaaatccttgacacaatgatgacatcatgatcccctccctacccttgctacacactgcctgggcttttcagttgcactatccaataaatgccctttattgtccatgccagtttcatttgactttcagtttcctgcacccaaatacaccccaaaagacccaaatacaccccaacagtctagacttattgccagttttaatcctcaatgtgactcttctacatagatactattgttcttcccattttagagatgaggaaactgaggctcagagagtgaagtgacttgtctgaaatctcacagccagaaactgtcagtgctgggatttgaacctggaaatgccttatgctcttctcaccatgttataagaccttctcttttctcatctatctctgggcaagtgggagggagtaaaacagtaacagccaccaccaaactccagtaataatcatcccagggaagaccaatcacataacatcaaagcctggaagacgcttagagatcattcagcacaaccctccatttcacaaatgaggagactgaggaccagagcggggaagagacacaggcagcaggaggcagattgggagccagagcctgggacagcaagaggacattgttcctgcaagggcagaggagtcacctgctgctcatacctggaggaagagggggcttctttttagcaacaaaccatctcaccctttgggggaactatcccttcccagctctcaagccacgtggcttgtagcctggcctcacctctggctccaggtctggccaatcagaacggtgcattcccctggcaacaacgattggcagagtctgggcatgtgaccccaatcaagccaatcagagtgaaccctgggacttgtcatgggactaccggaaagagaagctccagcattctaatggagctccgccttcagcacaggtaaggacaggctccaggctcagagctgccagttcgagtttaataacctagtttatttttgtggtattcatttttaaccctgtgttcaatttaaggtgattaactccatacagtttgccagaaccatctaggttttaaaactgaaagttcacaggtgaatggaggcaagggtggttggtcacccctgcttcaacttatgggtatcagatactggttttccattaatggcagcttccttttaaaataaacatttgaatttaaaaaggggccggacgcagtggctcacgcctgtaatcccagcactttgggaggccgaggcgggcagatcatttgaggccaggggtttgagaccagcctggccaacatggcgaaaccccatctctactaaaaatacaaaaattagccgggcgtggtggtgcacgcctgtaatcccggctattcgggaagctgaggcaggagaatcgcttgaacctgggaggcggaggttgcagtgaaccaagatcgtgcaactgcagtccagcctgggcgacagagcaagactccgcatcaaaataataatagtaaaaataaaacaaaataattttaaaaatttaaaaagagagtcacttgagggaaaataccaagaaactaatagtacctttggtgaaaagaaatggcaaaaatattgtgaatactgtgtcatgtgagtgagtgatggtgttgagaaatgtacaatgcctgcaagtctggaaacccaagctcagttcctgggttggtggcccactggccgtttgactctaaacaggttgcttgccctctccgagcctccacatcatcccaagctcacaaggccaaccatcctcagaggtggggagaggtcagagggcaggcaggctctgttgtgggcaggcaggctctgttcacccttatcctcttaagggtgaggtcttaaggtatgagttgctcccagtgcaaaagctggcaccaacagcagcaactcacaaatctttggagaggcccggcattccccactcagtgactgctgagtttgactgatggggccatgtcggcaaattagccaccattcagcagagacaccctttagagatgctaattgcccagtgctcatgcgtccccacccctccctggcacaggcggctggctgtcgatcccctgccattattgtctgataacagtgcttgatttgtctacacagaccagggcccctgcatgcatgctgttagcatctaactaccagccagcacggcgcatgaagcacggttcattaatgctcttgaggggagcaaacaggtgctggcagaaatctattcccgtggacaaatctgtggacacgtgcaccctcatacgtgcccacttagcccccaagtataggaatgagtcagtgtcacgtgtgcatatgcattctgtgaactactcatacgccggctaagaagcagcctcagacacatacgcacaggatggagtacatgcatgtacataacaggcaatgctacatggggttgtgttaggattacattacagaacacctgtaaggcgtcttgaacagcgcccggcatgtggttaattactcctcagtaaattagatctcttattattttttcccagtgctcctttatttattgaggtataacttacacataataaaatgcacaagttttaagtgtttagtgcagtgccttttgataaatagatacacttgtgtacccaccaactcagttaaggtccagaatatttccatcatccaggaagttctctcgggttcccttccagtcaatacctccaaaagcaatcactgttctgatttctcttgttatagttgaattttgcttgttcttgagcctcatataaatggaatcatatggtgtgtccttcttggcaatgcctattgtggatgctcagatgtgtgcacagccactcacacttacacacatgtgcatggatactcagtcagactcattcagaaatggggatttctgagctgtaaatcccttggcctcagcttgcagttcagctaagcctctctgggttcagaggactaaaggagatggggagagcccctgatgctgggtccagccaccgtggggggctccttccacattttcttcagcttcccttactgagtgacctcagacaagaactgaaaatctgttttctcctgtgaaatgaaatgaataataataacatacagctcataactcccctgtattgagcacttattatgcagtaggcactgttctaaggactgcgcaagttcgagtccactctgtcctcccagcaaccctataatccaggtatcatcattacctgtcttatgggaaaggaacctgaggcacagagaggcccagcagcttgtctgaggtcacacaggaaggggcagagctgcgatttggacccggtccagctccagagccttcacctgccaccattatccctctttatgaagggattatgagaattattgattatgtccatgccttggaacccagtaggtgctaaataagtattgcataagattactaccaagaacatttacatccactatctcactgatgcctcagaacagccccattttacagatgaggaaactgaggctcagaagtcagtggcaaaagattctggtcttctggttctaaatcccacattctttctattcccccagctggggatattctattccacaaggcagatgctttgttttgtttgctgctatgtcctcagcacctagaagagtgcctggcacatacttgacactcaatacatgttttccaatgaatgagtacagcagggagttgggaggaatcacccagcccaatgccctcccgttacagctgggggacccaagacctatagagaggatgtgactcatccaaggtcacacagcatcttggtgccgttgaagctattgttttctcccttgcctggctcacctcctctacccttgggcctgagcaagccaaaagatttgggagcccctgaggctctctcaaaggccacgttaatggggagctggcatggagcctctcccaacttcattaagccatccaaggtcagcacggaagcctgccaagctaaccctcagaaaacgccggctgaaaggaaacaaggcttgccagagcttttgcgctgggatggggaccattcctggcaaacaaggtggggagggaggaccgggccagcctttcaaagcccttcgtgaacaaatgcttggactgcagcctgctctggtcattgtcccctccaagtcagcagaaacagccaaactcttcagtctagcagggaaaatggagaatggactggagtctgtgtgtgtggggacagtgccaatgagagcccaccctgaagatggaagggaaaaggcaggaagatggtgaagctaggtagggggagaccatcccatcctgagggtaactcttagttgccagtccccagcccttgggcatggaggtcagttttaaataacactgattggccgggcacggtggctcacgcctgtaatcccagcactttgggaagcaaaggccagcggatcacgaggtcaggagatcgagaccatcttggctaacatggcgaaaccccgtctctactaaaaatacaaaaaaattagccaggtgtggtggcgggcgcctgtagtcccagctgcttgggaggctgaagcaggagaatggcgagaacctgggaggcggagcttgcagtgagccaagactgcaccactgcactccagcctgggagacagcaagactccgtctcaaaaaaaaaaaaaaaaaaaaaaaaataacaccgatcacctcccttcatgtcagggcatccctaaaagcagagcctgagacagggattcttaggcacgtgattcattcttgctccacgtctcctttaggagatgggggagagagagaagcaggacaggatagggaaggagctaagccaggatgtagcctcagctgaggtctagcttcggcctgaattgcaccaggtgttgatcccaccttgcagaaagagggctgagcttttgtacccctgactcaatgagtccacagtctgcctggtgggaggacgggagagctgccacaggttaaaatcccctggcaggcgactcccatgggccaagggcaattgtgagaggcaggagtcgtgagaagggggcagtggtgaactgttagcagcggggaatgccagcagttggggtgtgggtgcaccagctcgtaaatggagtgtaggtgaggaactcacagtgtccaccacactggctgtcctcttttcttttaaatttaaaatgtgtgtattttttatttttgtgggtacttagtaggggtatctatggggtacatgaaatgttttgatccaggcatgcaatgcctcataatcgtatgatggaggacggggtatccatcccctgaaacatttacctttgtgttataaacaatccaattacactcttttagttattttaaaatgttgggtgtcctcttattgtattaattcatcactacctaaacctcccaaacttagggtcaacccttagaagaaaagggagactgaattgaaccaagatacagtttccaccaccctccatcacggccattgcatccagtgtacgaacaaaacaacagccctgctcacacatctaggctcacagcatgcaagctgtgcctattccagttgtaggactctagaaccttcaagacactgagggcagaacttcagaattgtagctttcaggctctctgagctaatgtacccacaaagggggcctccccaggggaagacagaatggggcctggctcgaggaccaggctgggcagatgaagttacaaggtgaggaaagacaaggtggcttgaccaggtctcacgggaggccccacgacagaccgtggagaggatggcgagacctgagattgtgagaaggtgtaggaaattaggtaccagtggagcagccttggggtaggtgaggacctggctgcagccctgaccccagctgcaaaacgacctggatgcttcggctctgagtagcgcttagagcagggccacacttcaacaccacccatgccaaactgaacccctttcacctgggtacagcactctacagtgagcaaacaatctaatagctcagcatctggaggtgggtgagttgggggctaaatttgacgcagggggaaactgaggcctagagaagtgcactaacttacttcactagcaaattctgatgaagcacctactctgtgccaggcactaattcaggtcctgagatacttcagtaaacaaaagagaaacccctgcccacatggagcacatattcaggtgggcgaggagggggttggggaaggaagtaattattgctgtggagaaaaagaatgaagcagggaagggagataagaaggcaggagggctgggcgcggtggctcacacctgtgatcccaacactttgggaggctgaggcaggcagatcacttgaggccaggagtttgagaccagcctggccaacatggcaaaaccccatctctactaaaagtacaaaaaaatcagccagaatgtggtggtgcttgcctgtaatcccagctactcgggaggctgaggcacgagaaaattgcttgaacccgggaggcggaggttgcagtgagccgagatggcaccactgcactccagcctgggcgacagagtgagacactgcctcaaaaaaaaaaaaaaggaaggctgggggtggaaactgccatttgaaaatagagggtcagggaaggtgtcacttcctaaagagaggatgcttgaataagaacttggaggtgagagaagtcgtgcagggaacagcgggaatagccgatgctaagctcccccaggtagatttgcaatgggagacggagagatgaggtcagagaggtcttgtaggggcaggtcctgcagggccatgaggactttgctgttacactgagtgatatgggagccactggaaggctttgagtgggaggtgacatgacctgacgtgggttctcacaggatccctctggctttcagggaagcgtgtgagtgtggatgcaggtgagcagcgagaaagtaactgtaatagtccaggtgagaaatgacagtggcttgctctaaagtagaatttttttttttttttttttttttttttttttttgtgagacagggtcttactctttcacccaggctggagcgtagtggtgcaatcatggattactgcagcctcaacctctggggcccaagtgatcctcccattttagcctctcaagtagctgggaccacaggcatgtgccaccatgcccggctaattttttgaaattattttttgtagagatggggtctcaatatgttacccaggctggtcttgaacccctgggctcaagtgatcctcctgcctcagcttcccaaagtgctgggattacaggcacaagccaccgtacctggtcctaaagtagagtttctcaacttcagcactatcatcatttgggctgaatgaatctttgttgtggggctgtcctgtgcactgtggatgtttagcggcatcccggcatctacccactaggtgccaatagtaccatcccacctggtatgataccaaaaatatctccagacaatgccaaatgctctctgaggggcaaaaatcaccccccgttgagaacttctggtctggagcaggagtcagccagctatggctcacgggccaaatgcaacctgccacctgcttgtacaacccgagagcaagctgagagcagatttcacatttttaaatggttccgttttaagtgattatgtaagtacctacagaatatcctcaattttgcctcttggcctgcaaacctcaaatatttactatctggccctttcaagaaaagcgtgccgactcttggtcaggagtgttcatgggggtgatgaaaaggggttggaggctgatacactttgaaagcagggccttgggatttatgcagaggtcccacacggagtgtgaacaaaggaggagtcatgagtagctcccaggtttttggcctctgtggctggaaagagatactgagatggggggaaatcggcaggagcgagttcgcagtgggaggacgtggggcttagttttggagatgttaagtttgaggaatgtcacatagacaggggaaggacaccagctttggagttaggcagggtcattgtctgaatcccagctctgccgtggactcactgcagaacctcaggtaaagaaggacttgcctctctgagcctcagtttcctcacctgcaaaaaggagggcatgtttcgtgtgggctggatctctggataaggggcttttatgatgaacactgaggcataggcaatatgcttttaaagtgttttgaggatcacctgcgtcagaatcagttgagatccttgttagggatgcagatcctgggctgcctctagagactttgattctgtggtctgggcgatggacccggaatctgaactgcctgggttttgagaactcctgacctagggcttgggtgtccaattaaagagcctgtggctgcctctcaagacttgcaggttcccaagtggaaatgtctttaaagatcacagagcccagcagcctacccccgttaggcaaatgagaaacccgaagaccagagaagccgagtgccttgcctgaggccacacagctgggaagcagcagagctgggtctgggatggttgatggataggtggaaaggtaacagctggttcaggtaacaagcaattggatccagacagtgcgggtaggatccaggtcagagttgaatttcattttgggaatcaaatccttctggacttgggagagagacatgtggtttcttcccatttgagagtgttaaatgactctcccagactcctgttcagctaatgctttggagaaacaggagcccattttctgtgacactctttggccagccaggccaccccagtctccaataagccccttcctgcagcccaatggacttgctgaacccttgtgggtagcaatgtggggcacacaccaccagtattagttacattgaaatctggatttctcaaccttggctgcacagtggaatcaccttgcgagctttgaaaaacaccaatccctgggtcccatccccagagatcccgatttcacaggtctggcgggtggtctggcattgggatttttcaaagatcctcagctgattctcatgtgcagccaagactggtttagctgcccagggacaagccatcagaatcacattgattcacagagtgagaaggtgctaccctttccaattgtcttcagacccccagactccctgaagtggaaagtcccagtatgaagccagtgacattttaacacctctctaacacacatcttcccttttaacccagagagtaggtatcaggcttcagcatctggctggaattttatgacatgatttatggcaaatggcaccagttcttcataatatcaaatttcctgttaaaacaactcgatttagtaaaattaatgacttaatctaaagaagactattaagcaaatcctatttcaggtatttcccctggacctaatggtggtctctgacccaaactggttccctcactcatgatcccttctggccacagggattggctcagagatgatcatgtggctcaagtctgtccagtcagaggcaatcttcatgggaagagtcaggaaaaaaatggccattttatctgctggccttcatgctgggagggtggaatctggaggcaatgtcagctgagagatgaggaatgactttccaaggccaccggcattagtggtggagcagggatttgaactaggcccacctgcccacaaaggtagtacaacttcccgctaaaccacatttctggtgaattccctgggattcttcattttatttctttccttttcttttttgttttttagacagagtcttgctctgttgcctaggctggagtacagtggccctatctcggctcactgcaagctcctcctcccgggttcacaccagtctcctgcctcagcctcccgagtagctgggattacaggcatccgccaccacgcccggctaattttttgtatttttagtagagacagggtttcaccttgttagccaggctagtctcaatctcctgacctcgtgatctgcccgcctcggcctcccaaagtgctgggattataggcgtgagccactgcctatagttccctcagaacttctgtttcctgggttttgagtcttcatacgtagggtttacttaagtaaaatgtaatggcaccccataaaatataacccaaataggtacctttgaaaagctgatagaagacactgtaatgatcattcaacacattctgggcactggagaaggtatttggccacttgtaaagaatttagtgccctgtgctttcagtggatgataagaaacttctggctggagttcgagctgaacatttcagaccatctcaccactcctcaaccaaaggaaggtgaattgtggtttctgccaactttgactaacctctgaattcatccatccattcatccagcaaaattttatggaagatttgcatggaggtaggcaaagtgctagatgcaggagagacatgcctatagcagacaaggtcctactactggggagatcacagcccagatggggaggcaggcgctaatcagatcgttgcttaaacctatgtgaaattacaactggaatggaggccacccaagagagacacagagaactttgaaaatccataactgggggatctgacctattgagagattaggaaaggcttgcaggaggaggtggcattctatctgggagctctagggtgaggaggcaaataactggatgaagaagagaggaagagcattcgaggcagagggaacagcatgtgcaaagactcaaggcaggaaggaatttataatagtaagtatgagatcagcatggctggacacggggaggcaggagatggtagtggaagatgaagtcagagagtgttaaatgactctggcctcatggagtcttataggccactgtgaggaaatttaccctctcctcccaacccgttctgcagcaaatcaaacagaaaactcccacctttccatccaccctcgcttatagcataaggatgtgaaaaaattccactgctcttacgatttttgcaatttgaaaaatagaacaacgcatccatacaattggggttgcttataacttggggagtttgagttacttaaggagaaaaggaagaagagcaaagagaaaggcaagaagactaagaataaaaggaagaagtaagtgaggagaaggctgtggggaggaaacggagtggacaggggagggggtgtagtggttcagggcctgggctctgggggtaacaactggggttcaaatgctaccctgccacctgttagctgcatccttgcatgtgttacttaacctctctgggactcagtttccacatctgtaaaatagggataataataataccttccttataggatgtcgtaagggttaaatgaggcgatgtgtgtaaaacgtggtatatgagtgttagctattttgccattgtcttcagaggctgggttgcaccctctaacctctgcagtgtcctgggggaagccatagacttagcctggacagctggacggtgagaggaaacagagaaccccattgtgatggggctagtatgggacaggctttggagaggcagctaagaaatcttcctgggagaccaaaattcctccctgctagagcgagaatgcctcatttctgggagaagaagcgagtttctgcatttttcttagtgatagggaaagggctctggctacctccctcataaagaacctccagttcagggaagatttatccccacagtgatgaacactggaacccaaaacagtgaccaaggggatctatggataaactcttgcaagaaataccagggcctatcatggagggaatgacatcacgttcagtaagttaggggtgggatgtttaggcagagccctgaagcatgagtaagggaggccaagggagccagggtaggggccataagatcatcctagtcagatggcagcatgtgcaaaggccctgagttgtgacccagcaccacgtgctgacgctctgagaaagctatctagtacagctaggagaaaaaaaggggcaagataacaggcatgtgttacgaaggtagggtggtagaccttccagggccttggtggccagaaaaagattttggaagttatcccgagagcaacaagaagccgtggagtgaccaatccctctccctcctgctgtttcccctcacccccatccacaaaatctggagacacagcgaacaggcttggaggtgggccatgcatggaatgatttgggaactcagaaaactctaatactgtctctgaaggggtaataatcatccatccattcattcattcatccactcaacaaatatttattacttgctctgtgtgaggcacagttttaggcactggggagtgagcagtaaaatttgaccaagttcctttctaatggagctgatactgtagtgaaatgagacagataagagccagataaacctataagataacacgtggcaaaagggctatgaaaaaaataaaggaaggccgagaaatggagcataaaggcagggacgggaggtgtgttacaatttccttgcgaacatgaccaagccaatccttcctgcccgcccttgttccactgagcactcattacttgcaccatcataaatacagtttaaagattattttttagctccctccaccccatgagcaataaacctccctctccagttggcaccaacagtacacttgtggtgaccgcagtgaccaacaaactgttgcacttccccacgttctgctgccagcccatctcccgggctggaaagccgcaagcccttggcactttcttctgccccttgcctgacagtgtttgcctttctttggatgatggagcagtgagatcatccaggtgccccccaggggcttggcagagctgcttacttggatctgctccaggtcagccaacaagatggatttaagggtggatttaaacagagttgacaacaggttccagggtctttggcaggggtggggtaagggggccacactttggtcaccttcctgaggatcctgtcgcccttatcagcacgacctgagtggatgggcatcagacacaataagagagagaggcctatgtatcaggaccccgctggataaatgggggtttggggatcttctgtgatttgcatttcttcaataactgctgccaggaagacggatgatgaagggttaaggacacacagaagagatgagactcccaatataacaagcagggaataagacttccaactccaaacaccagtcttctgaatgtgcctgccagaattctgatcatgaagactgccgaagtgttctgaccttgaacctcagaattccaaccccgtacattagttccaacctgggacatcagcattctgaccttgcccgctagagttttaattatgaagagcaactctctggccatggactccttggctccaatgatggattagaggattctgacctcagatggcagttgtctgatcttgaacttcagagttgtgaccttgaatgatgttgctccaatactggacacaacagcagcaatcttgagcaccagaatcccaatcctgggccccctaatctctactgaatctctcaatgcccaagctttccagcctgaaatagtagagctgacatgactccacaggatacaaagtttaattctacacaataagcttttccacaggcccacagcccctagaaataagccaaatgcttcgatgatgataatgatgatgatgatgatgatgatgatgataacaacacaaataatactggcttacatctgttacacatcaggcactttgctgtgcactttacatgtttcatcttatccatcctctgggtcaccccagggatcttattattcccattttacagattaggaacctgaggcctagagccagttcagtttgctgacgtgacatcgagagctttttctagccactgcagtagctgtttcttcctgccctggttggagattgggtttgggaagttgtaactcattagctaatcaatttacgatttgcctgagaatttccccgacttgtgttgccatccatcaggcatgaactgccttgatttttggagccaagtcccgccttggggggatagtcattcattcaacaaagatttgccacccgaggttgtgcttgatgccagaaataagaagagggaaggtgggatatgatggttgattttatgtgtgaatccgactgcgccatggggtggccagattaaacatttatttgtgtgtctgtgcaggtgtttctggatgagattagtatttcagtcggtggactcagaaaagtacctagccctgcccaatgtgaatggacatcatccaagcctctgagagcctgaatagaaaaaaaagaggcagaggacggagaaatttgccccttttgcttcctgcctgccttctgagctgggacatgggtcttctcctgcctttgcactgggatttataccatcggcttctctggttctcaggcattgggactcagaccaaattacatcaccagctttctcctgaatgttcagattgtggaacttctcagcctccttactcatgtgagccaactcctcagaataaatgtcttactgggaagctgggcatgggggctcacgcgtgtaacccagctattttggaggtcaaggcggaaggattgcttgaggccaggagttcgaggctgcagtgagctataattgtgccacagcattccagcctggatgacagagtgagacccggtctctcaaataaatgaataaataaacaaatctcttagtgattctgtttctctggagaaccttaattaatacaggggacctattgcttctgtcatccaagctctgtctctttcctcccttccaggtgggggcctcagaggcaagaaatgcacccccaacatttccagccacgtgaaggctctatgctccagaggtcaaaaattagagccacgagggctgcatatggttccaaacatattctgtttggcccactcaaattgttttcaattattttttttgagacaggaaaacaatggagcttcctgacatgtgacactgatgctgtttcactcaacaagcaaaaggtacctgcttcactcttcattttaaaatggaaattgaaaccataccgagatacccgcttccatctgttagagtgacaaaaaaatcagaaagttcacaatacatggtgctgatgaagttgtggggaaacaggcaccctcacacatcgttggtgggagaataaattggtacaacctctacaaagtgcagtttggtcatatggatcaaaatgtaaaatgcacaaatctgttataaaatctgacttccagagatttctcccacagatatactcacagacacacacacacacacacacagatgttaagtgcaaagacagtcaccacagtattggagtttttgttgttgttgttgttgttgttgttttgagacggtgtcacgctctgtcacccaggctggagtgcagtggcgcgatctcggctcactgcaagctccgcctcctgggttcacgccattctcctgcctcagcctcccgagtagctgggactacaggcgcctgccaccacacccggctaattttttttttttttgtatttttagtagacacggggtttcactgtgttagccaggatggtttcgatctcctgacctcgtgatcagcccgcctcagccacccaaagtgctaggattacaggcgtgagccaccgcacccggccttttgttgttgttttgagacagggtcttgctctgtcacccagactggattgccgtagtacaatcatggctcactgcagccttgactccctgggctcaagcaatccccccacctcagtttcctgagtagctgggaccacaggcacatgccaccacacctggctactttttgtagagatggggtctcactaagttgcccaggctggtctcaaactcctgggctcaagggatcctcccaccttggcctccgtaagtgctgggattacaggaatgagacactgcacttgggcatgtttttaacttttaaaatgatttgccaacgttgaaaaaccgggatagctcccatgaaaattaaaatttctggctaagtccagacccagtctggagctgaatggctgctgccttctcaggcaggcttctgctccagttcaccactagccccctccactccctgcctgaaaagtggctggccatggaataggcatgttaggctgggtgttgaccagtgtcctccttgaacttgccctcctacagttcttccagcaactgcttcactgggtgacaaggcctacctagctccggtagccatcagagtctgaggccccggctcttgcctaggcagggaggttaaggccttctcctcctaacccataaggacctctgagtcattctgccctgcgggcagagctggcttcaagggtgtgcaacctgcacagttgcacagggccctgcgctcacaagggctccatgctcggtttgctactctgctatcaccatctcaaaattctttcttacttttgaacaaggggactgcatttttatattgtacggcaccccacgaattctgtagctggccctgccagtaggtcacttggtaattagggacacccagtcccccatacaccctgcccccaaggactgctctcatccatctagaaaaccacctctttggattggccagttctcccaggcatgaggccagcaagggtcccaaatttttatacaagaggggcttggggacagtaacctggggtggggaggggaacaagaggacttttcttgggttgcatttgcatagagctttatgtaacatggaggacgctccatcaaagaatgggggagtgtgatggggcctgggggtgggaggtggaggaagtatctaacacttcctctccaaccattccttggcacagtcattgcatgaagggtttgagcaggcaagggtatcatcaggggcaggactaaagcaaggtcaggggtagactctcttgaggagaggaaggagagaaggaaaaacaacttaacacgaatgaagtacctgtgctcagcccagcacagtgctgggccctctggcacggttaagtacacctgtctttccagtagctttgcttggtaaagtcaccatgcccgttttccagccaaggaaatggaaactcagagagaagaagggtctgcccagggtctcattgctcatatgtggggagtatgaacccagacctccagagttccaaaccagagctctttccacctaccctgccagggagacggcacatgagaggaggaaaaacattggtgcagagaaagggaaagatgcctaccccaagtgggcataatctcaaaataaaccagagaaacatgttatgatgggaagactgtaaacattaccaagtccaaactggccattcaaggtcagggagggcctctctgaagaggtgacctatgagctgagatctgaagaaggagaaggggctggctgacactgcaagatatgaagccagaggcccagagaagttaagtgattcactcaaggtcacacagctagcttgcatcttccttcccaccaatccacccacaaacacccaataagcccctcctctgcaccaggccctgatgcaacttcagaacacaggtcagcaaactttttctataaaggtttagataataaatgcgttttaggctttatggccatacatccaaaagcagctgtacatggcaggtgaatgaataggcctgcctgtgttccattaaaaccgtatttacaaaacaggcagcccacccaccctgttttgagcacagaagtgagtaagatacagtcttagactttgagaacatcctgttttatgtggagagatgaaacaagttaagaagaaaatagaatacgagagagagcacactgaacagtgcaggataagcggaatggcgatcttataggagaaagatcactcctgtagctcagcagggcagacatcaagttcaggctctcagaaaagtgcacgctctcagaaaagttcacatacactgagaagttttctttgaccttgccccattaatctctgtcaaaacaccttgtttctctccttccaacatacatattacacttagtgtgattattctttcatttaatttttaatttgtttaatgcgtatctccctccagtaggttataaactctatgatggccatggattatttctgccggtttacatttattctccccactcttggtaagaggacttcaatttttctttgggaaagcacctctttcccattctcaatcccatcccagctccagccattgacatgtgacccagacgcagctatgtgattggctcagggctgggccaatgaaaatcagccctgggattttgctgggcctattggaaaagagacttgctttgccccaggaagaaagcctggatttgagggggccatctttcctgccatgttggtgcagcctgctgagaagccatgacaaagaagaatagagcttagagatgtaggataccaagtcttgatgacatatttaagcccctggatccaaccttgctggaaaccttacccaacccaagacttttttttttttaacattttgcctaagtccattggagctacctttctgtcacctgcagctagaagaatcctaacaaatagatacacacgtgattttcaagcacccagcaggttgcctggcccacagtaacatgcactaaattgtttatcagacaaaccacaggcaggattgaaacaggtcctcaaagcatgcacatactcccacctaaacttagaaggaccagagaagcctagaatggaagccaccttgaaacagaaagaatgatctagaaacaggaggaatgactgagtcgaattacagtcactatttcaagaaacaataaaggttgtgcaaatgtatccactgaaaagagataaaagaaactcgatccattcacagagacagtgggaattccagacaagtgataagcaaaggaaaggctggttctgccttgtcttgtctccatctttccttttgcctctcatatgcccctgacagggcaatcatcggctgcctcttcggtacaactgagtctacaaagactctgagaggtggggctggccaagctcaagggctccaaggatcacacaaagcttagaaagactcagggatggcctgtagggagtgattagtgacaattgatgatctgtttttagaaactgtttggttctaggcccattacctggtggatgtaagtgatggtgtggaattggcaaatgcaatattattctctcaaagacagtgcctgcctgccagcccatggtgggcagttgtggtagaaaccagtctcatttcagagcaaaaatggagcagctgccaggtgcagtggctcatacctgtaatcccaacactttgggaggccaaggtgagaggattgctgaagcccaggagtttgaaactggcctgggtaacataggaagaccctgtctctacaaaaaaagagtacaaaaattagccgggtgtggcggtggtgcacacttgtagtcccagctactcaaggggctgaggtgggaggatcatttgagcccaggaggtcaaggttacagtgagccatgatcgcgccactgcattccagcctgggcaatagagcgagaccttgtctcaaaaacagtcagggtgtgagggaacacctcaagtgtctaacttaattgtgtgtctcctctctgtaaatggaaggcaaaaggccacttctttctgcaggcaggtagagacaagaaaggtggaaggagcagggtgtacctggaagagacccttaccttttaaggaagacccctctgatcagtcatcacaagatcatgcacatttgctcatttattcactcaacaaacgtttaccaacacctacctgcagtaacaatagtaatagtgaaatatactgaacacctgctgagtgccaggcacggcttgagtgtttcatatagaatttgcccaacaaccctggttgttatgaggctttccaaattacggatcaggacattgaaacctagagaagttatgtaattccccaaagggcacacagctcaaaagtggctgagctgggatttgaacccaggcagtcaggctgcacagcctgcacgcttaagctttcctgtttctctgtaggccaggcctggcatccacagaacaacccacaagtgaattttcacgatgttttgtgcgaggaaggtatgaacgtcaggtttccggtgcacagaggagggagcagtcagtgctgcctgaagggaagtgtaggtggtggtaggggggcggggggtggttaaagaaggcttcacagaggaggtggtggggaagctgggccttgaaggtggaaagagagaggctgcaggcagagaagaggaagaaatgggtgcaaggcagaggaacagcttgggcaagagggtgaccagcgctgaggaaggctggagcttttgggggcatgcagaaaggttagtgtggtggtcgcagagggtgtctgaagaagggatggggaggagatgaaggtggagagttgggttgggatgtcgaaagccaggctaaggagtgtggactatcctgggggcagtgggaactatggaagttttgggaagggggtgatgaagttgagcagactgcatttgagaaagtcggctctggctgctctgcagaggttgaactggatgggaaaggctggaagcagggagcctattctggggctcagaggctcccaggaagggtcagagttcagcagtgacccacaaggtcgcacctctgatctcacctccttctactctcttgcctccggtacactctgctccaaccacattaatacctgaatgttccttgagtgccccaggcacgttcctgtcccagggccttagcactgcttttctctccacccagagcactcttcccccacatgcccacatgcctgtctccctccctttctacttggcaccttctcctttcctgaccagcctggttaagccccagcactcccctccttccctgcagaactttctccacagtgccatccaaaatattatatcaggccgggcacggtggctcacgcctgtaatcccagcactttgggaggccaaggtgggtagatcacttgaggtcaggagtttgagaccagcctggccaacatggtgaaatcccatctctattaaaaatacaaaaaattagctgggcatggtggcgggtgcctgtaatcccagctacctgggaggctgacgcaggggaattgcttgaacctgggaggcagaggttgcagtgagccgagattgagccactgcactccagcctgggcgacagagcaagactctgtctcaaaaaaaaaaaaaaactacataattatttgatcttgtcatttcgtccataaacacttcagtatgtgtatctaaaagataaagattttaaaacatagtcgtaatagcattatcacatctaaaaacacagcattcattcctcaatatcatccaatattcagttagcattcatctttctttccctgattgtcttacagtctcatgatttattttgcatggttgttttggtccaatcagtatctgtgtttatttttttaacagtcttgctccttcttctactggaatatcagtgccatgagagctgggatctttgttttgatctctgctttgtccccagcacccagcacaatgcttgacacatagtaggtgctcaataagttccactgaatgaatatacacaaccaatcctgataataaaagtttgttattgacctgttgggcattatgtgtctgttactgttatttgccataattatcaaatccttacaatctccttatgaggtacgtgctgtgattaggtccattttacagatgaggaaacagctacgtgacccaaggactcacagcttaaaaaaaggctagggcttaagacccattgcacagcctgagggtctgtgaccactggtggaggcaggggcgttgtggcttcccaggagctgcctccacaccttacatccagagtccagccacttttcaccgatcttccctgccaccaccctcttctgggctgtcatctttcttctctttcctggaataatgcaatatcctcctggcagcggcttatcccttctttctctaatgtccattctccactgctaaacatcctccaatgcacaggacagccccacggcaaagaattctccatcgccaaatgtcagtagcactaaggttgagaaactgggctctggttgaaaaaccagacacattcttcatccagagcctggcataagcagctgagagtcagacttctagcaatgtgttagtaataagagtgaaagtcccaaagtttgtaaacaaattcctttttcatcaattagtattctcagttatctctaggataacatcattcattcatttattcaatgcatgtatttcatgcctgctctatggcaggcactgaagacacaacagtggacaaagcacacaaaatccctgccctttgaagcttacatcaaagtgggagagagagaaaggaatcatataattaagtaattatatgtcaggttgaaacaaataaagcagccatggggaatgaacagtgctattttatatgtggtggtcaaggatggccttgctgagatgacatttgagctgagacttgaacaatgtgaggggtgagtctcgtggcatcagcaggaagaccgtaccaggcagaagggacggacagtaagtgcaaaagccctgaggtgggagggtgcctagaacagcaaggaggccactgtggatgcaacagagtgatggagagggagagtggtagggaaggaggctgtaagggtgctgggaaaaggggaaagatgccagataatgggccctgtgagtgggactgaggagttgggctttttctcggagtgaggcaggagccataggagggttttgagcgggggcgtgagttgctgtgtgtggagaccagacgggggatgggaggctggaggcagcagatgggactagaggctcctgcaatggtacaggagggagaggatagggtcaggaaggcagcagtggggtggcaagaagtggccacaacctagacacgtcactcacacttgcatctcactctctcacttgcattctgccaagccgtcctgagtggaagaggaagggatgagccatgctgggtgtgtcagagattgccccttatcctggcaacaatgataacagcagctgccccagatggcgactccctctgttcccagcactgcacatggtgctccacagcttagcacctctgatctccgccatcccatgttgtcttctgtggctgggcttcctggccgtgtgcagaatcacccagggcaacaaatggtgtggggaaaatggggatatccccatgcaatggaatgaagttggttccttatcttacacaccacatgcaaagacctaaaataagactacaactgtcaaactctcagaaaaaatttggggaaaagctttatgatttccccctattgccaaagattcctcgaatataataccaaaacacaggcaacaaaagaaaaaacagacaactcggtcttcaacaaaatacaaaacttctgtgtattgaaggacacaatcaacagggtgcaaagacaacctatggaatggaagaaaatatttgcaaatcgtatatcttattagggattaatatccagaatatataaagaattcttacaactcaataacaacaacaacaacaaaaaccccaatttaaaaataggcaaagtacttgagtagacatttctccaaagaaaatacagtagtccccccttatcacagcaatatcactttccaaggttttagttacctgcagtcagctgtggtccaaaagtattacatactataagatattttgagaaagagagaccactttcacatagcttttattatagtattttgttgtaattattctattttattattagtttttgttgttaatctcttaccgtgcctaatttataaattaaactttatcataggtatgtatgtgtaggaaaaaacatataatatacagggtttggtactatccgaggtttaggcatcctgataagggggtgctagtatatacaaatggccaaaaaacacatgaaaagatgctcagcgtcactaaacatcagggaaatgcaaaccaagactgcaatgagataccacctcatgcccatttggatagctactaaaaaaaaaaacgtaaacaaaaaaatagcaagcattgacaaggatgttgatatagtggctatttgtcccctccaaatctcatgttgaaatgtgatccccaatgttggaagaggggcctgcctagtgggaggtctttgggtcatgggggtggatccctcacggatggcttgatgccctccttacggtaatgagttcttgtgagatctgcttgtttaaaaaggcctggcttctctcttgctccctctctcttcatgtgacacacgtgcttcccctttgccttctgcatgactgtaagcttcttgaggccccatcagaagcagatgccagcactatgcttctggtacagtctgcagaactgtgagccaaaataaaactctcttctttataaattacccagcttcaggtttttctctatagcaatgcaaaatggactaatacagataggaagaaattggaacccttgtacaccattggtgggaatgtaaaatggtaacagtcactatgaaaaacagagcagcagttcttcaaaaaattcaaaatagaattaccatatgattcagcaattccacttctgagtatatacccaaaagaattgttaaaaatctagttggtttctgcttatccatgcccagaagaattgaaagcatgaactctaagagatatctgtaccccatgtgaatagcagcattattcacaatagccaagaggctgaagcaaccaagtgtcttttgatggaggaatggataaacaaaatgtagtgtatacatacaatggaaaattattcagtctttaaaaggaaggaaattctgacacattacaacatggacgaagctgaaggacagcatgataagtgaaataagccagtcacaaaaggacaaatactgtatgattccacttatatgaggtacctagaacagttgagttcaaagggacagaaagtaggaagggggttgccagggcctaggaggtgggcccaggagaatttaatgggcacagagtttcagttttgcaaaatgaaaaagttctggagattggttggacaacaatgtgaatatactttactgaactatacattttaaaacggttaagatggaaaatttcatattatgtgtattttaccagaactaaaaagaaaccacttagggggtgagtttcaactgtggggcctaggcatgagtattttgcaaagcccaggtgatccttatgtgcaggcagcatggagaagcgctactctgtgaggtgtgccccaggtattacccccacctcccagtctcagagaggtgaggcgccttgggggctcatatagccaggaagcagaggaggtgggatttgaatccaggcctgtacccaggtccacagaagtgtgtctcacatggcaacattacatcttatttgttatttatgtcatcagagaaaacatttaaggagcattggcgccctggatattaacatgagaattctagctcccaccccacccactcccgatacgggggctgagagattcctcccatttctggccccacctagtcatgcccactcctgctggagacaccaaaatcaagttgatttcacctcagggagaaggtaggaccttatgcatttagtttatctattaaaataatgcttaatgctaaatctgtctctcccatagtcccatccaggagcctttgggggtaaagtcgtcctagatccagagctaagaacactcctaagtcatagggtgattctggacaaatctctctcctctcagcactgccccagcatgagaagggaatactgggatcttgcttctcactttctgaaggtcactcatacaactcagagatcaaagtcatgggctgggcagtcagggagtcctgggtgggatctgtcccagccttccattcactgtgtgaccctgggccagacacttcccctctctgagcctcagtttccacggctgtaagatgagggtagttatccctcccttatgggggggctgtgaaaatcagatgtgatggggcatttaatgccctttgcactatgccaggcaagcacattgtaagcactcagtgttagctgttgctgccaccactgtggttttcattttatctaagagacagagatgaggctgactgtgccctgccagacctagaatttcttcttttacgacaacctcctagaggttctctctatcgggggtgggctgtctataatacaacaccaggtcattctgaataaatgatatgtcctacagagctttggttggtttccccagaatctcagatcctaagacaaggttctgagtacaagtggcttatatgataagtgatcccagaaaactctggaagaggggagggaacatgagacagggataggaaagaggtcaaacagggtctgttatcaaacaagtaattgctgtgagcaactgaagctgccctggggaccagtgtagaacacacacctctgagttatacccccagccaggggagaagcacgtacacatcgtccccatcagccggcaggtgagtatcccactagttcctgctggggtgttagtgccctgcctttactggactccagtggccagagaaagcctctaaccttacaatgagcaggtatcatttgatgagagcagttttttgaaaaggagcttatttatcttgcaggattgtcaggaggattacatgagaggacagtaaaaaagaaaaaaaacaacaacagcaaaacccaacagttattgagagctttctacataccaggtcctagtctaagtgctttgcatacattaatgcatgtaactcaatccaatgaggcaggcacagtgattggcccaaaattgctgttggctgaaggaaccagggcacagagggctgcaatagttgaccccaaatcacatggttagtgagtagagaagccaaactctgaacttgggcaatccagtgctaaggtcaagtgcttcccatcctgatgacattatcaagtacaggaagtacacaaagtgctgggtatggagttggtgcctaacgcatgcttgttctcttctagttagttaagctttggccaacccattcatttgaccatctctttttcttcctagcatttcacattcacacagcaagtcggtgaaagatcaggggccatgcccaggcctttctggccccgccacccgtacccgctgaggctcagggatctttctgttactccaggatgtttgaccaggatcatctcttagcagctggtctctcaggggatttgaaaggctatgatgggctgtgtgatcctcagcaggtcactggagcatcctgggtctctgggtttctttatcctgtggggatgtgggatttctcaggcacagcttcaactctgatcatgtgctatcatccttcatccttcagacaaccctgtggagtaggttttattatcgccctcacttacagattaggaaatggaagtgatgagaggtgaagcaaattggccaaagtccacagctaggacaaggctgggctgcgattcgaagccaggtctgtgtgaccccacaatcaggattcagaattgctggcatattatctgccaggataaaaacaggcatctggtttgaccaagctggggccagcaagagcctaagtcgatgactcatcacactgaaggggccccatagattctgagttggttcccgcatttcttttgatgataatacacagatccttgtggctcaggtcaaggaagctggaacctcattacactagagacgtgtagctggagcagaggaattccgtgaaaacactaacaatcgttgctgccacttactgaatgcttcccatgagtcaggcgctgggctaggctctttacattaggggcatctcctaacagctcttcatggttgcctctgttataattctcatttcctagataaggaaagtgacactcagagaaggaaaggggcttgcccaaggtcatattcatggtaagcaatggagacaagaaatcaaccgcatctgttggactccagagctgattcttaatcaagtctgtgatgggaaaaatattgaccactgttcctaaagaaaggccactctaagctgggcatgatggctgtcacctttaatcccagtgctttgagaagcttagatgggaggatcacttgaacccaggagttcgagaccagccagcacaatgtagcaaaaccctgtctccacaaaaaaaaatttctaatgtagccaggagtgatggtgtgcacctgtagtcccagctactcaggaggctgaggcaggaggatcacttgagcccaggagtttgaggttacagtgagctctgattgcaccactgcactccagcctgggtgacagagcaagaccctgtctctgaaaaaagttaaaaaattaaaaataaataaataaaggccactcccacttttgaatacaataatacttcatacttataaagtactttccatttacaaattacattcacatctgaaatctcattgaatcatcaaaagagccctgaaagggagctatgactattatcaccatcaggcagatgaattcactggacctgagagctaaaatgatccacccaaggtcccaggatttagaaacataggcttgggaaccagacaaacttgggttcaaaccttggctctgcaattttcattcctttgataaatatttactgagaacctagctgtgtgggctcaggcaagtgacttcgcctctcagagcctccatttcctgttctgtaaaagagtcttcataccacttatcagatccattccctctctcatctgaaaatgccagacacttgctttctcaggttccctcagagctagagcatgagcatgtgacctgtcctggccaatgggattttaaaagaagtctgctagggtgctcctgggaaagggtttcctctcagaaaaaaaaagaaagtgggccaggcgctgtggctcacacctgtaatcccatcactatgggaggccaaggcgggcagatcacttaaggtcagacatttgagaccagcctggccaacatggtgaaactctgtctctactaaaaaccccaaaattacctaggcattgtggtacatgcctgtaatcccagctactcggcaggaggctgaggcaggagaattgcttgaacccaggaggcggaggttgcagtgagctgccgagatcatgccactgcactccagcctgggcgacagagcaagactccatttcaaaaacaaaagaaagaaagtggagcataggagaaaatgtttctcttcacggattaaacatcactgaatgtacgtctgagggctggaactgggcagccatcttgtgatatgaagcatcaagcatgaggaccaagccacttgcaggggttggggagcagaggagcagagagatgaaaagaatctagaatcctggtggcatcattgagccattaactcaacctaaaaccaactgccttggaacttcatattatattcaatgatgcatcttcctccttattgaagctactttgagttttctattctgctgcttgcagcccaaagcatccctaactggcatactacctggttgtatccctgttggaggaatttcaatgagatagcagatatgaagcaccactaatcagtgctgggcacaacaaacataagctaccctggaaattaggaagttatctcagggctttaatcctgagactatcccagggatcacagacactcctgggctggcaaatcagttccctgtctctcctactgagaaaagcctgtcgagttttccgagaaagccaaagccccgtggtagccccagcaccgcaaccctgtcacaccaatggggctgtccccatcttctaaacaagaatcaatcacactgccttttgcctaatgggttttgattttcgctcccctgatggcaaagcctagggcctgtgctttggtttgtctccgagttgccagaacatcccatcaattattaacagtgtcagctcagtctccctggccctgctgctctcagaaggaaagggtttgcagcaactcggcccacccagccctagaaaaaagactcttttccttagcatttataacaacaatccccacctgctatgtgctaggctttgagcaaaattttgacaaatgtgatttaatgaagaccctgtaaggtgagccttttatctccattttacaggtggaaggttgggacttggaaagttggagaaattagctaaaagctatggaagtggggagtggcacagaaccagatccatccttgctcttcagcatatgagatatggccacttttgtatcttacaatcacctagaaatgatcctccatttggtcctgtcactctgtgagttctaagcaatttccacaggctttgcttgttttgacaagcaaggcatccaagctggggggatgggtggggatgggatgggcaaggtgcagatgactcaaaggaggccagaggcacagggacctgggttgcaggtgggcagtgagaaggggtgacaggtccccaaaccctgagacacagtgactgactgcttgcttgcttgcttgattcattcattcgttcattcattcattcgttcattcattcatttattcattccacatgctcctcagtgccaggcaccatcatgggtgctgggaatcaagcagtgaatcaactcatggtactcacattcttgtgggtgtgaaacagagacacacaaagaaggaaatataatttcagatggcgtttaaggcctctgcaggaaaggcattgcatgatgcaacagagagtgaggggagggaaactgtttagaacagcggtcaaggaaggtctgtatgaggaggggacatgtgagcagggacctgctcaaatgaggaagggggagaaggggctggccaagggggaatctggggaagagcattccaggcagcggaaacagcaagtgcaagggtcctgaggtcagataaactctggcctgtttatggaacagcaaggccagtggggctggagccaagtgaaccagaggagatcaaaagagatgagcccagagaggtcatgggggccagattctgcctgggccttgtatgccaggatgaaaagtctgaattttattttgagtgtgatgggaaacttctggaggattttaagcagatgaataatgtgatccaatttacattttgaaaagctcactttggctgctatgtggggaatggattgcaggggcaaaagtggaagccgggagactggggaggaggctgcggcacttgatcattatagaaagaacactcggtttggatttctggctactcctgactgcctgtggtgtgaccttaggcaagttacttaacctctttcagcctcactgtttgcgaaaggtgggataataacagagctgcgttgttacactccatacacagtaggtgtttgatcattggcagccaggatttctattctgagggccagtgagcctgcctccctccccatttcagctctggctacagaaaatcctagatggtccatctgccaggaatgtgagctggcagccccagactgggatcatggagaggtcacaaggctgtccctgctagcggattaacccaagggagaggagaggttctttattcccaaacagcacctcttgcaagccccggtgcttgggtcttgctgccagaccaaaacatggccctgtgcctgcttcttctctgggagggcaaattgtccagttccctgtaccttgttctcatgtcttagggatgggacagggagggagagtcacatttgggcctaaatgggatgtgcagtgggagaacctgtgtcatgcctggaaatagcaaaataagtctgttgatcctaagctgattaagggtgagtgactctgtcttaggaggaggctttttggacacaaaattgggggcgggattatggagagagacagcccacagcctcagaggaggaagccaggcccaggagcctctacatccttgttagggccaacagggaaacgaaaaaaacacgtgggggctccctccaccctcttaccagccaccccttctccatccactctcaggggcctctccttgggtggctagatctggaggaaggaccccacggagtctcccttcagactgggacctgcaggtgggccttcagtgagaactgagccggagaccccacaatgaaaggctgggctggacaggagtcagccctagctagtaagatatggctggatatttaggcttcctcctctcctctttcttttaccacaaatctacttacctgacccctttttttaggccccacactcagttacattctccccatgtttcccaagttggtcttgctggatttcaacatcaacatctctcttttctgggttctccgtgaacctcacagaacctcttttatagccttgcacacactgttttgtcatttgctcccagcacccagcacttcgggcacatgaagacaggccccatctttcccaggcaaccccaaatcccagcctgacgtagagaagttgctgatcaaccagtgccctcctgccctgccttggctcccaccccaagccttcctcagtcccctacagcccctgccattacccagcagcaccaaagactctctggcccactctttgtgttcaaactcattcctgcctcctcctcctcctcctcctttatttttcacattgcctcatttttctctcctattttgaaatttacatcttgttccaagagctgaaacatctttacaagctgcaccaaaccattctggaaataaactcaccaaataaataagtaaccagggggtgacccctcacccgcaagcatccacaaccaactgcatgtgtcgtgtgggtccacacccacccctcggggtcccttcttacttatgtttaaactatctgacagtatctcaatgtcctgtaagcatgtctgtaagctgcttttttcccttgctggggcagagtgaggttataaatatggagatattaaaatcacagggtgatccaatccagcctaggtctgggacttcacagggaagcaaaccctactccaccccagcaagccactgttgtctctctgtgctctctctcttattcgtcagtgtccatcttcttgctgtggctttttatgggtccctgtgaaacctctccaaccaagtaggggtataacgtcttggataataaaaagatggagtgaccagtgccacatgggaaaagtctgagggggttggtcctcacctctggggactcagtcctagcccctccccattactaatcttcatcgttgggaacaaagccagagtcctccagcagtggtcctcaatatggggatgcaagcagatccccccagaccagcagcccccagatcccagactcaccttggcagccacagaggaattgggcttctccagtaggtcccagagttttttcctcttctctgcgcagcacgtgttatcgaactcctcgccttcccgctcccgtagggtctcggcctcacgcttgagctcctcgttcatctgctctttcttctggtggtagcgggcctggcagcaggactccaggtagatctcgtcgatgccccagtagtcgagctcttggctgaagctgagcgcgcacatctcctccatcatgtgcagtcgcccagtgcggtagaagttgaggatggaggtgaaggcgcccgggtggcggtcaaagaagtactcgttgtcgtcgaggctgtagtcatcgcacacctcgagcagcgagtcgtgcgtgttgcagtcgcggagcttgcccagccgcgtgcggggcaggcggtccagggtacgccagagtacctcgtgcgccagccccccgacgttgaggcggacccgccgagagcacgccttgctgcgcacgatctccatgggctcgggcggcagcgagctggtggagcgggagccatgcttcgtcatgcccgccggcatcgctgatccggccgcccccgccccccctgcccccccaggccgctgtcactcgacggcaaggcccgctgctgcgggggaggggggcagggagcgctgtgggctgctgggggtgcagggggccccgcgggcgcgcgtcacggccgtcttctcacctccatcccgacggctgcgaggcagaaagcgaaagcggacgcgggtcagcaaacggggagctgggcatgctgtccccccgccccccacctctccaccaggctcccagccggccttgaccttcccccgcgcttaagcggctcagtggggtaggacggatggtcgctgtccctcccgccggtgctgaagtccgccgcaccccatggatggagggaggggccgcccctcggggcggggagagggccccaagagatgcccctggagcccgggaggccccaccctgggcttctgcggcccaggcgcgacccagccgcccggggcgctgtccgccccttagagtgctgaaactctcttcattatgggtctcccgatcgagtcccgaacctggccccgccatggggagagagggggagctgcatgaaaactttctttctttatctttttctttctttcttcttcttctttccttcttttttttttttttaacgagttctcttcttttccttccccttctcgagataatcaagattttgggggtgggggaatggcagcgggcttttttccaaatcttaaaagatttgggggaattccgggggttccaggtgcccacctgtccgaggtcacaacagacggggtgtgcacaacagcccctctgtcctggagcgacccctcttcccaaacactggagcatctcctgagattgctccagcgacaaggtgagccgcgaggaggaaaagcccgctctcgcctctccctctgagcccccaaccctaccgcaggaggggcgggcagagtcctcgggatccgcctgctccgtcctcccctcgctccttccccgcccccttctcctccttctcctccccctcctcttccttctccccctcctcctcctcttcctcctcctcctcctcctcctcctactcctcctcctcgttcctctcccgcgatggctttttataactccgggttctgcgcctttccccgggcttggaagggaaggggtgggggaggtgggaggcggggaaatgagctaaattttctggccttttcaaaaggtgccatcctcctaccgcgcactagtgatttcggggggttcccctgagcaccccctgcatgtagggctcacgccttagccccagaatggggattgcgcgtcccctcaggcctcagcccttgcctgcctcccaccccgctcccctccagcctggagctgcggagcccgagcagaccaacaggccgagctgcggcaggcaaaccccctgtccgtgtccccatgcacccccacggaaggccgtacgccccaacactcacccccagggcggccgcctcctggggccagggaccgcgcatcgtcccggccgcccgggcgcccccgcccgtgggcagcggcggtcccggggccgggctgagccgggcctaccccggccgggcaggcaactcgcccgggctgcaggcgccgcggggccggggcgcgctctccgaggcggggggcgccggcgggcgccgggggcgcgggggcaggaccgcggccgcgcggcacctcctccacctcctcctcctcctgctcccgcggcggcggcggcggcggctgcctgggcgagatcaacaagtcggggctgagcttcggctccgcgctcgctgctattctgtcccgcacttcggagcgcccggagccgggcaccaaggcaggacggcgccacctgcgggtcggaagcgagcgcggcttaactcctgcctgcccggcccagcctgccggggaggccgggggcgggctccgggatcgggccaaggagacgcgcgtggccgtgcatccctctccacccaggccacctgcacagctggcctcgcgatcccgccttccttcgtcccgtcaacaacgtgtgttgaacgcctcctgtgcgcgagccgcggtgcagggcacggtgacaggcgtctgagatacagctgtgaatcaaacacaaacatccggccctcgtggagctggttggaaacagatcataaacaaaaaagcgaaaggatatatgaggcggtgacaagcgctgggggaaataatgaaacaggaggaagggtcagagggtgggagggggcagatcggaactgtaaatagcccttgctttcatgagcttccattctagattttagcggggggtcgggggtgggggacggaggcggacaatgaatacatcagtacatatgcaatgtggcaggtggtgataaccgctaagaagaaaaataaagcgaggtatggggaagagagggtgaagagtgagctggtttatatagtctggtgattcattcattcattcattcattcatttattcatgttaagttggacatctggttattgacagcttcctatgtgcaagcagaatgccaggctccgtgaagggaaagtcttccccctggagctccccatccagtgggggaggcaaaacccatcacataatcccagaaatgaaaactggaggaggtacctggagaggcaggcaagggttctctaaggatgccacagatgggccttgtgtttactcatttattctttcaaatattcatttactgcatgataagtaaataggtgtcagcggccgggcacagtggctcatgcctgtaatctcagcactttgggagactgaggcgggaggatggcttgagcccaggagttggagaccagcctgggcaacatagtgagacccatctctgccaaaaaataaaaaattagctgggcatggtgctgcttacctgtggtctcagctactcaggaggctgaggcaggaggatcacttgagcccaggaggtcaaagccactataagctgtgattgcacctctgcatttcagcctggataacaaagtgagaccctgttgcaaaaaaaaaaaaagaaaaaaaaaagtgccggggatgggtacagcagtgagctcccctgccctggaggacaaaaactgaacaagatacagtgttccaacacaggttcctctctggcccttttcttcctttctaaaattaaggggttcatttccataatttccatagagttgcacataatattattatatattttttacttgtccacttatcatctccaccatcatgacccttgtccaaggtaccatcgtcttgtctccctgcaacctccctgcaacttggctcccatcttggcctcatccctggctcccatgcctggctcccatcttggcctcctacagttcattctccccatggccaccaaaacaactgctacatttcatggaccatgaaatgttggaccatgtttctcatctgcttaaaaccttcccaagactttcccttgctttagactaaaacctaaacttctggcctattgccctaattcagcccgcccccctttctgagcttgtagaccagtggaggaagacaggtaactaaaaaagtaaatttttaaagagagagtttcaggctacagtgattgttataaaggaaatggaacatcatgatggggtggaaaaagagagaccaagctgctagtgttacacagggtggtcaggaagggtgtctcagaggagattaatagagattgaaagataagaagggactagccatggggagaatgagggaaatgcattccaggtggaggaaacagcaagtgcaaatgacctggggtgtgagagacagtgaacaatcacattccctcctgcttcagtctggtgttcctagggtcagaaagggttctcagctggcccctctgtaagcctaatctgttgaaggcaacttttctccagagatctgggcattcccacaggaggtttcagaaagcaataaatccttcctgatgagagggaaaaaatgactctataatggtgaaatttccaggcattactgcaggcattacggtgccttccaggtacagctaaaataacacctagaagtgcggttcttctctactccatataaccaaggagtggagatgcatgtttgttgggcacctactacaagtagtcctctgaaggtataacatccatcagcttccacatctgtaaataagagatgaggttatttatagatgtggaagctaaagctccgagagaaggtgtcttgcccaatatcttgctggcaagtgctggcacaaccagatatgggaatctcttgtttgactccaaaatcaacgggctatccaaataccagagcagcctctctgcaaagtcctttctccatcagttcatttattgattaatggaatcattccagatgtttactgagcatctactgtgtgcctcagcatgggtgttggtgctgggaattgagggtgagtaatttatatggtccctgtcctcgtggagccacacacctctcttgccaaggccaggaacagacagaaaaccttgttacttgtttttcttctgtattgtttttttcatttttaaattcccttttatctgcattcccctcccactagcccataggaaatggttgtcatgtgtcaaccgtatattgttttgtttgggtttgtttttgcttttgcttttagagatcgggactcactctgtcatccaggttggagtgcagtggcatgatcatggctcattgcaacctaaaactcctgggctcaagtgaaccttctgcctcggcctcccaaaatgttgggattacaggtgtgagccactgcgcccggcctgtatattgctttgtttgtatgagttcttgaaaactgtgtttggtgttttgtgtgcactttaaaacttgcatatatggtttgtgttatacatcacattctatttatttttctctaagatccatccacgttgctgtgggtacacccagcctgctgcttgtaatagctgcacagttgttcacgatgacacaagtcccctttccactgtccacccgctatgtggtcacccagaagacctccaactcccaccaccacaatgaatgcatccacgagcatcctcccatgtgtctgcttatgagccagtgtgatgattttttaaaaaaacatttcctgcaggttcagaattgacacatcacagagtatgttgcacttaatttaactaagcacacccaagtctccctacagatgtctgttccaggctgcatctcaccagcagtgcttgagagttcctacagctccacatcccagccagcatttggtattatccagatatgtaggttttgacagtctaacacgtacaaggtaacatctcagtatatttaaatttgcatttctctgattactaatgagtctgagactctcttcatatgcttattgttctcttgtataaatatcacctgtgcacatagtggcccatttttctatcaggattcctgtttttttcttgatgatttgcaggattcctttgtataatgcagattttaagtcccttgtggattttagacattgcaaatatcttcttctgctttgtcacctacctgttaactttgcctatggtgtcctttattaagcagaaatctttttaaagtgatcaagataatctatttttggctgtatagtttgtgcttttaaagtttttgtttgagtcctcccctgcccctaagttgcaaacagttttgtttattaattttatatttttattttttactttaggtctttaaccaattgtgtgtgtgtgtgtgtgtgtgtgtgtgtgtgtgtgtgtgtgtgatttggtagggagccaacttcattcattccctatagctggctagttttctgaaaactacctatgaaataacttgtcctttccccagctgatctgtgggccacctttgtcatatgaagcctcttgcactccccactctgctccattgggcttcttgtgcttatgtcactgtggtcctgtttttattagcatggctttatagtgagctttagtgcctgtagcccttgtctctcttctttgttcttttttagggcacacttggctatttgtggacctttaatcctctctacaaactttttagtaagtttgttatgggacagtttctcttcccttgcactcatttcctaatcctgatcaccagtttgccaccaaagcctacccacagctcctctacccagtgaaacccctgaggaatgttgccatggttaatactaagtgtcaacttgattggactgaaggatgcaaagtattgctcctgggtgtgactgtgagggtgttgccaaaggagattaacaattgagtcagtggactgggagaagcagacccaccctcagtgtgggtgggcaccatccaatcaaccaccagtgtggctgaaatagagcaggcagaagaaggtgggagaagctgacttgctgagtcttctggcctccatctttcttccatgctagatgcttcctgccctggaacatcggactccaagttctttggcttttggactcttgggcttacaccagtggctctcaggtgtttgcccacagactgaagcctgcactgtaagctactctacgtttgaggttttgggacttggactgagccactactggcttccttcctcttcaatttgcagacagcctgttgtgggacttcaccttgtgattgcgtgagtcaattctccttaataaactccctttcatatatacctctatcctattagttctgtccccctgaggaaccctgactaatacaaatgtggacagacaggtccctggaaagaaacctggggccaatcttccaatcagctggaaagccaaggaaagcaatttccctacaaaaatgagtgagacaggtattttgatgttattatgtttgtttgtttgtttgttaaacaaacgggatatgttacaatgtctggagatatttttgactgtcataactccaggggagagggagagtggttgtcctggcatctagtgggtagaggccagggatggtgccaagcaccatgcatggcccaggacagccccaactgtaaagaattctcctgccccaaatctcaacagtggcaagattgtgaaaccctgcatgagttagatggaaggcaaaggtgtttcccagtctggaaatgccattcttcaaccaaccattaataaacacctactatgtaccaagcattactcttgacactggagctacagtgtaaataaaatagacagtactgcgctcacggacttatattcttgtgggagatacagttaataatcaagtaaataagtcattctgcttgtgataaacgcaatgaaaaaaagtaaatggaagcgatagagcctaactgagagagacatcagcaactttagatagagtagtcagggaaggcttcctggaggaggcaatatgtctaagctgagaacctgtgggtaggaaaagccaaccatgtgaagttctgaggaaggaggtacaggcaagggaacagcacaagcaagggtcctaaggtgggaatgagcttgatgtgttctaagaacagatggatgccaagaccaagccatgcattgcccggttgggattttattctcaaggttaagggaggagtttgagttttttctaattgtgatgggaagccatggtagtgttttaagcaaagaagtcccatgcactgatatgttttgaggcgatggctccagctgctggtgtgcactatgaagtatttgaggataaaaaatggcggcaggaaaacccacgataagatttctccaattgtccagggcaaaggtaatgagatttggactcgatgatagtggcaaggatggctgggcagtttcacagccacaagtctctgatgggagactggtatctagtgggtgggggccggggatgctgctaaaccccatgcaatgctcggcacagccccccactataaagaattcttggccaggcatggtggctcatgcctgcaatcccagcactttgggaggctgaggtgggcaggtcatctgaggtcaggagtttgagactaacctggccaacatggtgaaaccctgtctctactaaaaatacaaatagccaggtgtggtggcgcatgcctgtagtcccagctattcaggaggctgaggcaggagaattccttgaacctgggaagtggaggctgcagtgaaccaagattgcgccactgcactccagtctgggtgacagagcaagactctgtctcaaaaaaaaaaaaaaaaaaaaaaaaaaaattccagcccaaatgtcaatagtggcaagattgagaaaccttagattaattaaatggaaagcaaaggtccccaagcccaaggccagtgctagatattccacatcactcagattcttccccactagtggcccgatatttacaaagtgtggctccagattcagataaagaacatctgggtatgcctggagcttgcaagtgcaggcagtgggaatggctctgtcacttttcagctaacagccctgttgtgactacttgtccatttatttactcaaccaggattcagtgcaaaatgactcagatggcagtgtgacctgtggctcagaggaaggattctggagtcagaatggtgctattacttacttgcagtgaccttgggcaagtgccctaacctctctgagcctcaattttctcatctgaaatacagggtggtaataaaaagagcacttgctttatagggttattataaggaatttgtagaaagcactcagtcatcaccagctctcattgtctggtaactgcaggttacctaagggcaggagctggtctgtcttgctcatctcatataacagaatgcttaaataatagagacttaaagaatacagatacttacttatctcacataaaaagttaagaggagggtggcatgaaagttgattcagcagctcaaccctgttattaaggacccaggtttcttccacccttttgttctgcctccctatgtgtatgggcttttcatgcccaggcttactgcctcattgctacaaaatggctgctgttatgccaggcatcaatcttcataaaatcatattcaaaggcaggaaggaggaggtgacaaggatggccaaaataactctcgcttctctcactctctctctctttttttgtaatcccgccacccactatcaacttcccctaccatctcattggccagaacagggtcatatagccacccctaggctgatcactagcaaagggaacaggattcaccccatagggtgagattattcctgtattaacaaaattcaagttcctttaataaggaagaaattaagacagaagttgggtgggcagccacagtgtccaccatactgttcaccagtggccagcacaatccctattacaaagtaacgtttgacaaatgtttttgaatgaataaataaaccctcttatttgagggcatataagaagcttatggaacagtttggaggtttctcaagaaactaaaaattgagctaccatatgacctagcaataccattgctggatatatacttcccaaaaagggaaattagtatatcaaagaaatatacactcttatatttattgcagcactgtttacaatggctaagatttggaagtaacctaagcatccatcaacagatgaatgaataaagacaatgtagtacatatacacaatggagtactattcagccataaaaaagaatgagatcctgtcatttgcaacaacatgggtggaactggagagcattatgttaagtgaaataagcaggtacagaaaggcaaacatcacatgttctcactcattggtgggatttaaacatcaaaacaattgaactcatggacagagagagtagaaggatggttgccagaggctgggaagggtagtgagggcttggggagggggaggtggggatggttaatggataaaaatatagaaagaatgaataagacctactatttgatagcacaagaggatgactatagtcaataataacttaagtgaacattttaaaataaagaatgcagttggattgtaactcaaaagccaaatgcttgaggggatggatgccctatcctccataatgtgctcatttcactttgcatgcctctatcaaaacatctcatgtactccataaatacatacacctactatgtacccacaaaaattaaaaataaaacaaatgaagaagcttatgaataagacacatctctgatctcaagggtatccagttctattcgttgggataaggtatacagaaataaattcgacaatgatctctcttattggcccctccccatctccaaggctttgatgaggaaaccccctgagatcatttaagatctcagtatctcaactgacatttgtatatatcttaaaaaaaaaaaaagaatggctattctgcaaaagttactggggggaaaaaaaaacaaaaaaaaaccagaaatggctggtacgtaagcagtgttccagccctctaggcaatctctattccaaatagcagagggcatgagctggtggactgtggacttgtgttgtttggccatgagagtattttttaaaattgtaatcaacagtgaaacatcagaagagtttacataaaatatggatttgcagcgtcacttgaaaaattaaaggatctgattaacactggaaccacattcttgcatggcatggcaattatggctgacacagagttgtggctgcccttgagtcacagctgctcctttaaagcaggacatgctctcctgtttgctacagtctccacctttccctaaagcccctcgctcaagtcatttctttttttttttttttttttttttttttttgagacggagtcttattctgtcacccaggctggagtgcagtggtgtgatctcagctcactgcaacctccacctcctgggctcaagtgattctcctgtcttatcctcccaagtagctgggattacaggcacatgccaccaagcctggctaattttgtatttttagtagagacagggttttaccatgttggtcaggctgttctcaaactcctgacctcaagtgatccaccctccttggtctcccaaagtgctgggattacaggcgtgagccactgtgcccggcctcactcttcttatttatgttacctgcatggtcctggtataaatgtgagtctgtgcttcttgcatgcaaaggccaagggactccaaagaggctatcttgcctctctctgtttccccagactctgcacagtgcatgatttagaattttcactttctgaatgaaaagactgtaagttatttgaaggcacatagccttcatttctaacaattttctgccatcataagaggagagactacctagaaataaagccattagaggggaaagttgggtgcccctggattttccagttatgtgagctcataaattctttttacctaagccaagttgagttgtcattgtgtcatctacatccaaaagagctcaactgatataatcctctttccactgacgagaaggttataatctacttttttttttctgagacaaggtttcactctgtcacccaggctggagtacagtgacatcatcacggctcactgcagccttgacctcctgggctcaagcaatcctcccacctcagcctcctgagtagctgggatcacaggcatacaccactatgcctggaaaatttttgtatttttataataatagagatgcagtttcaccatattgcccaggttggtcttaaactcctgggctcaagaaatctgctcacctcagcttcccaaagtgctgagattgcaggcatgagccactgcagttgtaatctacttgagccctatatatacttatatatacttataggaaacaaggcaaaaagagtaataaaaagcagaatattctatagagaagggacaccccatcccaatgagaacttaagtacaggtcagttgtggtggcacacatctgtaatcccaacactttgggaggccaaagtgggcggatggctgagcccactttttattaagccccgggcaatatggtgaaacaccatctctacaaaaaatcagaaattagtcaggtgtggtggtgtgcacctgtagtcccagctacgtggaaggctgaggtgggaggatcgcttgagcccaggaggctgagattgcagtgagcggagattgcaccactgtactcctgcctgggtgacagaacaagactctgtctcaaaaaaataaaaataaaataaaataaaataaaatatctcaagtacagccatctcatttaaagatagggaaataaaaagctgatttaggggaacaggatcccagtggtcagccagtgagtggggaggcaagtaccaacacccgagcacccaacttctaggccaaggccctctgaaaatgttttctgctcaatcctctctgcagacatcttctgctgagaagtgttcagatttttctcagaggctgagtgaggtcaagtcaacccaattcgtccatgtaaatacaagtgatataccctttaaaaggtgctggcaagagacgtgttcacttgaagtcaagcttttttctttctcttggactccataatacctgtcatcatttatttataatcccactgagtatcctacttaggttttttggcacatctgggcactgagcaaggctaattaatcccccttcccccatgaattcctgggtaagaataattgctttatgagggtggttataggggtacccgaagcctcaaggaaaatcattacatctctgagtggatgtcgctcaggacaacgggtctttgctgtggccctgcccagacaaagcaccagcagcctgagggatttttccatcagcttggactccagtcttctcacccatctctcttttgtcacaccccaaaataataatcataatcataattaaaaacaggataatggtggaatcttcctctcagggttgctgaaagaagtaaaaagataatgcaaataaagtgtttcacaccttgcctaaaagtagtaagtactcattaagggaagagtagtagcaatgctaacaatgacaatatcagctaacattgattgagcacttcctgtataccaggccctgttctaaatgctttgcatgcgtctgatctcatttaagattctttccagctctttcactctcaggctgaatattctgatataaacaagacctattaaatgttagatgatacttgagtgaacagatgtctgattctagtgcctgttctattttcccctagcctgattgtctttattaagccctgggtttcctggcccaagttcctggtaagtggatgaacttggttttcttttctttcttcattttcattttctaaattaaataaaatttgttttagagttggagtctatgttgcccaggctggccttgcactcttgggttcaaatggtcctcccacctctgcctctcaagtatctggaattataggcacatacccagtgtgcctgactgagcctggttttctgaccaacccaaacatttacccatctctccttcctttcttttgcctatcacctatccatcaacctaatcatcccctcatccatctatatactcagcaaccaaattattcaactacatacccacccatccatctacccactcactcatctattcgttcactcacccacttactcatccatctttctttccattcattcatatattctatccattatccatcttgctaccttctcatccacctacttatccatttatccatctatccacccatccgtacaccatctgtctttccactcatccatctatctgcccattcacccacccacacaactactccctcatccaccccaaatattcatgcatctatccaccactcactcgccagtcatccatccgtccacccttctaatctatccatgtatctatctgcccacccagccatctcaacccatctaccacctaacatttgcagtgatgctctgtgctaatccctagcttgttgttttgggctccctccctgggaggaaaggtgagtgccatcagagggtccccacagaggaagacagataaaccagtgagcctctttgtggcctggaccttcaaagccactgacttccagggtctgtggccaaacaatgatgaaatgcacatggaaaatgagaagccctgcaattacatggaaagagacagaggctcagccctcccaatgttacagctgaatgcagcattccaggcatccctaccaagccactccaccatagggtggagatggatggaggcacatgcttccagcagagcaattagaggtaaactaatatctctttcccacagaggagcctgggaactccaagacgcaatggaaaggaggcgagtcagcaaaaggaggaaatcaaagccacagagatcaagagctaattaactgatcctcctaagataatgtttcattaaaatccagttcttctgccctgtggggactgatatctctcctactgcctctccattgcccttttccacccattcctgatctcatctgcctccgctctgatctttccccaagtcttctccctcctccaatccaacctccccccagctactagggtagacttttaaaggcacaagtctgaccatgtcactccctatttataagtcttcaccactcattgcctgagacaaagggcaaactcccaagataaggcaaaggccgttcattcatttaacacagatttcctcagtgcctctcctctctcacaagcttggggatggtaggacacagaaacaagtttctgacccttgccctgtttctccagcttctttacccaccactcctttccacattcctgcatttcagcaaaaactttccaacctccggcttagtgatagccagtccctagggaaactgttgttagtatccatgctttgctcagctcacttccacattgactctgggcttggccttgtgacttgcatttaccagtggaatgtggtggcagtaatgccagttccaggcctaagccttgaaagggtcgggaagcttctgcttttgtgctcttgggagctctgaaccactgtgtaggcagccaggctaccctgctggaagggaccatgtggaaaaaccacatggaaagtgagaagccctgcaattacatggaaagagaccagaggctcagccctcccaatgttacagctgaatgcagccttccagccatacctaccaaggcaccaggcatatgaatgaagtcgtcgtggacgtcccagcctcacctaacatctgactgcagctgcatgagagacccccaagtgagagcagcagcagaaccatccaactataagccccattctctttctattagttcttatgagagctattcattctcatgagctttttagaaagtgccaacctggctgggcactgtggttcacgcctgtaatcccagcactttgggaggctaagattggtggatcacctgaggtcaggagtttgagaccagcctgaccaacatggtgaaaccccgtctctactaaaaaaattacaaaaattagccaagcgtgttggcaggcacctgtaattccagctactcaggaggctgaggcaggagaattgcttgaacccaggaggtggaggttgcagtgagccaagatcatgctgctagactccagcctgggcaacagagtgagattccatctcaaaacacaaaccaaaagcgccaatccacaaagacatgagaaataataaaatagttttgtgttaagtcactacatcttggagttgtttgttacacagcacgagatatctgatacagaggccttgctcctgctatttccacagcttagaatgtttctccaaccccagccatcttctttaccccacatggtgaactcctattcacctttcagagcccatattcagcatcaccttccctgcctcccatagtctgagttaatgtctctttcctctgggaaactgtatgagactaacctacaatacttatttttctgtttcttccgctggctatgaatgacaatatttactcatgtaatgctcacaagaaccctatgagggagacggtattattatccattatcctattttacaggtgaataagctggggcacagagaaatgcccccaaatcaccctggtattaagtggctcagcagagatttaagcccactcagaacccaagctcttgtccactgtggcttcttagtaaagtataaaaaaggtatgacatttattggtctcatttaacacaaaatccagaagtaggtgatgccaggacctgtctcagcaacagcctagctatctcagggtccttgtttgatttctgtgagagtctcttgtccacatcgtcacaaaacggctgccatgctcagcctctcacatgacaactcccagagagggaggaagaaggaacatctcccatatttcagaagctccccactgattttcccagccatctcattggtcagtactggatcacatgaccaccactagcccagttactggcaaggggaacctgatatccatgtttggcttggccctgtcttgatttggaggttgggcccattttcttgagcacaaggctgcctaatatctgaagaaagccagggtttcttctagtgaggaagttggccaatcaattagtgtctcttctgcagtggtcagctcttagaacacctgaaataaagtcacatacagaccctgttcatcccaaggatccagatgtcccaaaggtcaatctcccagatttgcataatgtgagttgtcttagtccatttgtgttgctataaaggaatacctaaggctgcataatttatagagaaaagaggcttatttggctcaatgttctgcaggctatacaagatgtggcactggcatctgcttctggtgagggcctcaggctgcttccactcatgctgaaaggggaagggcagcccgtgtgtgcagagacctcatggcaagagaggaagcaagaaagaggcaagggaggcaccggctcttttcaacaaccagctcttgcaggaactactagagtgagaactcacttcttaccatggggagggcaccaggcctttcatgagggatcaactcccatgacccaaacccctcccattagaccacacctccaacattgggaatcaaatttcaacatgaggtttgcaaaggtcaaacatcctaactatagcatgggtgcacctgccttgtctctcccaggccactgtgaagctccacggaaggtcctggggcaataagatagtacactgccagctcttccccaactcatcaccctcccatccttgcagacacacactctgaaccatgtctcaaatggccatgactcccaaatgccagaccaataacgtgtttgcattttcactggtccatcatgaaatgaatgagaaaaaacagggacaatggaatgagatttgtataaagctaaattgattccatttaaaggatgatggtgatttactttcctacttaaactctctcatggcttcccagggcacttagcataaagcccagcctcctcttcctgacaaggtctgctcccagagtggctcctgccaccccctcactcagccacagccttcctgggatgctctctttctccagcacaccaaaccccttgcctctttagagttctttggatttgtagtctctttctcctggaatgttcttcctctagttctttacaaagctgcgatctctcatcttgatctcaactcctatcgccacctgcctggagacttttcctgactgcctccaaggccacaggcacatccatctccgtgtcagcatccatcacctcctgctgtttgcttgtcctcagcatctgacactgtatttatgctgatttgtttctttactggatggcctctgctgcccaaatgtgaaatctatgagggcagagaccttgcccggactagtgcagtcccttcctccctggtctccagcttcccagccctcagcatgcacggtgagatggatcctcctagaatacaagttaaaccatggcccttctctgcccagagccttccgtggctgctggccacactgcctccctcctgctcctagaacctgccccagagcttcccatcttcacatttgccattgcatctctccagaacattctttcctcagatgccccagtggtttgctcctctcatttccatcgagtttctgttcaaagctcccccagggaggccattcctgctcactctctttcaaatctcacttcccatctcctgactcctttattcttctccaaagcacttatctccatttgaactgctttatattttacttatttgcctcatttcttacagtttctcccatgagaatgtcagcgccgtgaagacagggatatatcatttttttggtctgtgttactcactgccgggtcctgttgtctagaacagtgcctggtacaatgagaggtgctcaaaatatttacttaaaaagtgcataacagctttcttgaggtataattcatatatcataaaatttgcccacatgaccaggaacagcagctcacacctataatcttagcactttgcgaggctgaggagggaggatcatttgagcccaggagtttgagaccagcctgggcaacatggcaaaacccccctctatcaaaatatacaaaaacaaaaattagccaggcaggcatggtggctcaggcctgtagtcccagctactcaggaggctgaggtgggaggatagctagagcctgagaggcagaggttgcagtgagctgaaatcacaccactgcactccagcctgggtgacaaagtgtgacccctgtctcaaaaaaaaaaaaaaaaattgcccatttactagtacattcacagaatttcacaaccatcacagtgatccattttagtaggtttcattagtggtcactccctacttctccctatttccccatccctggaaaccactagccaacttcatgtctctatagatttgcctattctggacatttcatgtacattcagtcctataataagtggccttttgtgactggcttttttctcttagcataatattttcaaggctcatttgtgttgtagcatatgtcagtacttgattcctttttattgacaaatattattccattggaatgggggatacatcacattttgcttatccatttatcagttggtggacatctggattgtttccaccttttgggctattcaatatagacttttgagtgagtggttgtgttaattccaatataaaacctacctttctgctttaggggtattaaaatatcctttcataagctgacagtaggagtaaatgtatttcttaatgtccttacctggcaaaataaaacactgggtctttctgttgactttaatggtacaagggtatgaaaggccaaagtcttggagctgcagatcactaggacctgggttataacaaaggctaggtcagcggctcagggaagccaagccctgtccctctggccctgccatgtggttcagaccatgactggtaaacaagagagcataacgcagcacttctcaaactggggtatggtacccctctgagggcacatactgatgtcctgaagagaaagactacatttcccagcctcctgtctgtccagcaagctgtggtcatgtgattgagttctgaccaatgggatgaatgcaggggtttttctcttctttgcttcaccctctttcctgctgggtggaatgtggacaaaatggctggagcttaagcagccataacggcccctgaggtggaaaccactggttacagatgctagagggtccagaaaggagggaacctcatgattgtggagatgtcacaccacctctggcctcccgtatctgcttgaaagagaaaaaaaaaatgtggccatgcatggtggctcatgcctgtaatcccagcactttgggaggccgaggtgggcagatcacctgaggtcaggaattcaagaccagcctggccaacatggtgaaaccccgtctctactaaaaatacaaaaattagctgggtgtagtggcacatgcccataatcccagctactcaggaggctgaggtaggagaatcccttgaatccgggaggcggaggttgcagtgagctgagatctcaccactgcactccagcctgggagacagagcaagactccatctcaaaaaaaaaaaaaaaaaaaaacctgtggtattgaatgaaagcatgttaatatataacatgttgctatgttactttgagaagtctgtcactcactgccaaatcccatcccacctgatgtgcctccatgacctcctcacagatgaggaaactgacgtgaggcacatctgccctgggatattatttctatacaaagatttgagagaaaaaaccaaatttctctttttatttctcccaaggcttatttaatccatttcaccccttcttttttattttaacatgaatgcatgcattctggtgaaggatggacagcatccggtgaattttaaagagagcttttgtgttgtctgcttgttaccagggtctaccccaaagtcctctaatgcggcagtccccaacctttttggcaccagggactgatttcatagaagacaattcttccagcgacccaggggtgggggtgggaggtatggtttcaggatggttcaagtgcattacgtttattgtgcactttatttatattattattacattgtttgaaatagtgagataattatacaactcaccataatgtagaatcagtgggagccctgagcttgttttccttcagctagatggtcccatctgggggtgatgggagacagtgatagatgaccaggcattagattctcataaggagtgcgaaacctagattcctcgcctgtgcagttcacaatagggttcgccctcctatgagaatctaatggtgccactgatctgacaggaggtggagctcaggcagtaatgtgagtgatggggagtggctgtaaatgtagatgaagctttgctcactcactcgccattcacctcctgttgtgcagcccatttcttaataggccaaggacctatactgatccgtggcccaggggttgtggacccctgctctaatgggtacccagtccctctgctgccagccggaggatcactgaaagaaagatcctgaacactgtctcaggcagcagagggtcctgcatttgaattccaggtctattacctcttagccacacgttctcgggcaaaccacttcacctctctgaccctcagtttctttctctgtaaaaacggggatactcatctatgccttggagggtgggtaaaggtgtgactcagttctgtctgtgagaggcctgggcccacagcaagggacagagtagatgctctgtgctctcctgtcccaagagctgacctcaccattccaggcacggccaatgccctccatcagaatcacactcagaggcagttccacaaacaaagatggtttaatagatttcagcatgtttccacttgacaatgttatacgaaaatagaatctttattaaaatagcaaggcataacaatcactgctactcaggaaacactgtgtttattctttttaatcatcaaaatcaatgactttgggcaagacctgtgaaatctcagagcctgtttctccatctggagaacaggcaggtagggcattgccagctccctgtgagtgggggccactggtgggaggagatggccctggtcgcccatgggatgagaaacttactcctgcttctgtccctggagaaggtcagggagatgccagtgtggccttaaggcaattctaacacttgcttatctcgttttgtaacagagaagagagagctctcagccttggccacaccagcatggagcccccttccccagcgaatttatttttcatggtcactttctatttttggcagtgagtgatacatgttatccactattggcagcaattggggggaaaaaaagttcattttaaaaacaaagtttaggccgggcatggtggctcatgcctgtaatcctagcactttgggaggcccaggcaggcaaatcacgaggtcaggagttcgagaccagcctgaccaacatggggaaaccccgtctctactaaaaatacaaaaatcagttgggcgtggtggtgtgcgcctgtaatctcagctacttgggaagctgaggcagaagcattgcttaaacccaggaggtggaggttgtggtgagctgagatcgtgccattgcactccagcctgggcaataagcgtgaaactccgtctcaaaaaaaaaaaaaaaagtttaaaaagcgagtctgtttaaaggagaatatttggtaaacaacaatattaaaatatagcaaataatagtaacaataatcacaatggtaaggaaacacttcattagatcaacttaagagtattttattcttggctgggcgcggtggctcacacctgtaatcccagcactttgggaggccgaggcgggcagatcacgagctcaggagatcaagaccatcctggctaatacggtgaaatcccatctctactaaaaatccaaaaattagccgggtgtggtggcgggtgcctgtagtcccagctactcaggaggctgaggcaggagaatggtgtgaacacgggaggcagagcttgcagtgagccgagatcacgccactgcactctagcctgggcagcagagcgagactccatctcaaaaaaaaaaaaaaaaaaagagtatttcattcttgccactgagcttaaaaagaaagaaagaaagaaagagtattcctaacatatgtccagtaattttgattcttaagcaagggatgaagaaatacaatggcatccaggtaacttcctaactagcgcatagcaggtagctaacccactcatctctccctcttttctttatagcttctattttttttaaagagaaaaataacgattaaaacaagggcaggtttaaataatcgtctcctgagctgcacttcagtatctcaggtaacagctggagctgcctggtgggagcacatcttttccttgagtgtaattcactaatgactgtggttccaaggaggtgcgacctttaaagggaattggcccttctttgaaggcaggtgagaatctagtctcagtgacaacccagcctgatttggaaggggggagtcataagggttttcgcccagcacaccagggttgcagcctgcgcaagaccttccatagctatttctgccggcttgcttccttcccttcccagccacgatgaggcagctgagggttgccacggaaaccggctctgtcctcccactggaggctgccagctctgatttcctgcagagttaagaaggaggcggcagtgggggtcacccaggcgtgaagatgggtttccctggggatatcctgcctcctgccaatcacagcgtctctctgggaatcctgggggtgcctggaggctgaggcccagggaagcccccaaaccccagtgctgctctgagaagagactagcctctgggacattcagaggtctggggttcttttatctccctccagctaaagctagagggacctcattatgtgtcttacaagatgtacccaagtttaggtgcctctggctctgtcagctcctgaagtcgagaagaattgtcccatcaccagtccccttgagcccaaagaacaggagttgctcatccagcatttgctcctgggacagtaaatctgcctgcagagttctacagcttatgagctatgtggccccaggcaagtcacctcacctctcagttttctcatctatgaagtgggcacaaccctccttctcttcatagagatgctgtgaggagtagacatactgtctgtagggtctctcgcaggcatttaaagggtctcaataaacaggactttatattaataaaaatagcatcataaaaaaggtttgcaggccatttttctctttaagctgttttttattttaattaattatttatttattgagacagagtcttgctctgtcgcccaggctggagtgccgtggcgcagtctcagttcactgcaacctccacctcctgggttcaagcaattctggtgcctcagcctcctgaatagctgggattacaggcacgcaccgccacacctgactaatttttttatgtttagtagagacggggtttcgccatgttggccaggctggtcttgaactcccgacctcaagtgatccgcccacctcggcctcccaaagtgctgggattacaggcaagccggggcaaaggcaaattttcatcactgatacatttgttcaaagggtggtgcactcaggctgggttggaccaattagctggtccccaccacctcttacaatgtcacttctaagagttagaacagggtctcacactcagatgccttcaggtccaggaggcgctgtgaatgcagaagcagacccggtcagaaccctggtgaagccgagagcacatgtcctgcataagggaggcggctgccactcagctctggccaagagttacccttgggaatgtgagcccagtgtggccagatataccaagttttcaagagaagctggacattttgaatgaactctcccaaagatgataacaactaaggcatttttttaagtgaagtccaaacaaaacacgtctgcagactggatcgtgatcacagttggggcttctgcactagaatgcatgaaatcggcaccttcttttttggcttgatcagtctaaggagtcctggctggctccttccagccatcttgtctgggctgtgtcttccttagctccctacctgagtgctgacactgagaaagcccatcccatctggtgcctgtcactctagaacagagaactccactcctcagagcccagtgtttggagggtgcccctgttctgcaccgggaatgcatcagccttgggggaagctctcctgcattttctcaagtagtgtgagcaatggggcaatctggcaaatggggccccagggaagcagatcttctaagggactcctttggttttagctagtttaaggattattgggggactgactgctgaatgacatcaatggacacaaaggacatcctgagtggcctttctgtggccagcatccgctttgactggataaggcccgggccatgctagctcataagaactaggaaggtgacacctccgggagttgggggcagagcagtgaagactcctagttctgccttatctgaatagcatttgtggatatcacgaggtgagagtaacgaggtgaattgggagcagacaaagcctgattttggaaagaaaactttgcagtggataatccatagagctttcaatgtcttttctttgttcaccctcttagcttttccctcccctggacccagccttctgggagaaaagcagggaagtggtaatgctagcacctgcacccgggccaactgtgcacacagaaagctgggaggctggggcaggctggggcaggctgggcagaggcgagcacgtggatccatctgctccctgtgtcatgggcggatgcggtagcggacgggcacgtcgtgttccggctgcatcagaccgaagccgtacctgctgaggtcaaactcagggatctccacatctgcgttgatcagctccaagtccaagtgcaccagcacaaggaacacaaatctgcagagagatggcatggaaggtgtgaaggagaggagtagggcagggggttatcgggaacaaggcaggggagccatggctgcctcctaagtctgactccaactttgagtaaagtgaggagaggagtgaggaagtagaagaaacgcatttgctgctcaccacatttgccagccccctgtaaggttaggcaggcccgtggatgagttctggtgaatgggctgtgtgcagaagtggcctgtgtcactcctgtgtcaaagcattcgcgagccagtgtgtggctctccagctgtccctcctgcctggcagccatgcaggcttcacattgagacggtggagccgaaagagggaaagagcctggcccgagtctgtgcacagagtggggaagccctccaatcccacagctgataccgtgtgagtggaactacacctctgttggtaaaagccactgagactcggcaggtgcagagctgagcctgtgctgattaatacggcgactcctctggatcctccagcccacacactttgccgcctttccccacactcctggaaccctcactgtctatcttggccaggactgctgctaacccttaggtgtctttgtgagattagaaacaggcatcgctctcaagacattttactgccatctctgagaaaattgtcctaaatagaccaactttgcaagaacaagcactctctactgccatcttctgggaaaactgtcataataactattcgcagctgccatgcctatgatgtaatcagtgcccccataaatgtggaggcagccctacgggggatgtcaacggttgctgcctccctgcctcatcttaccaatgcccatgttcgtaagggtcaggagaatatcttatgactcttttcccaccactattccctaccccaacccaggcgcccgatgcagcactgagcacatggtggggattcttttgtctcactgaaggagtgaagaagagggcagatgaggagagaggggagttaacactctggacagatctgggctgtgccgcttatgggaatgtggccctcgccaagttcttacccactctgggtctcagttctcccatctggtcaaagaggggaaaggcatgttgagtctcttccagctctgaggctgtaggaaactagagggtgagtttctaagggatggcggttttgtgcccacccctggatttgaactcctgcacctccacttcctgggaacacggcaaatgatctgacctgcctagactcggttttagatggaccagcagggttgtcatgacaattcagtgagataaaaataacaacaaattagctaatttattggaacactgtgcgctaggcaccatctaagcatttagtacccgctatctctttttatctgtccaaaaacttgatgaggtaggaatgccagtcggttctgctctaacacttgttttgaacaggtgaatttgttccaataggattgatatattagggcaccatttgaatataatgcaagtttcacatttgctcacgtgcaatttcacttgtgagaaacatgaggtgaagacgaaagactgcacccagctgaacctgggtgtgcagaaatccataaaatatacacatgcacacaactaagcatcgatctacagccacagttattacagcacttacatagttcttagccaggtaacatgtataaaactttactaccattttttttactgggttcttctctctctctcttttttttttattatgtcactgatgaggtttttgagtgttggccccagtcccccttttccctcaatccctgcagttttttctttctttctttcttttttttttttttttttttttctggagacagagtctcactctgtcgcccaggctggagtgcaacggcgcaatcttggctcactgcaatctccacctcctgggttcaagagattctcctgcctcagcctcctgagtagttgggattacaggcacgctccaccacacccggccaatttttgtatttttagtagagacggggtttcaccatgttggctaggctggtctccaactcctggcctcaaatgatctgcccacctcggcctcccaaagtgctgggattacaggcgtgaatccctgcagtttttgttgcatgatttcacacagcaaggtgattttaaggaatgcatatgagctgtattatgttcataattgactccattttcttgaggaaactgaggctaaaggtttatgtaacgtgcccactcacttagcacaatgcatgcacaataatgatattaacaattatggtaataattaacatttttcaaatgcctacaatgagccagacagtgggttaagaacttagaaagatccaattcatttatcctgacactcctggggtatagttataatcagaaccctcattttacagttgaggaaacaggctcagaaggtaacccagcttatgattgcacaggggctggacaggaggacagggcagatgtcataacccctggtccaatctgtttgtgatcctggtggccaaagctcctggggttcaagggagataatttatgaggctctcggccccacaggtattaaaataaccaagtgggaacagtgaagttcggccagttcctaacatgaagttctgaacatgcggcagcagctgcagacgggtagctacggtcagctgaaaggaatgtccagtatttggaatctggacaccagtcttggagggaagaacctgctgccagatctgattatttcaaaagaaatccgaaatctggcttttttacacgagctcttctgatttataaaagcacacagttgtaaaaccacaaataagagatggctcacgggctgtccatgtgaagcctctgccaaaccattctcctggctgagccctcagtcccaggagagaagggcgcctgccaaccaggggatcaggagccaccctggccctgccctggccccccactcactgtttgatgctgttgaccgcataactcctccccaggcagtgattgtgccccgccccccagggcatgttgtaattcttcagccgtttcccatccttgtaaaagtctttcttctctgatccgtcagggttcaggaatcggttgtatttaaatacctgaaataggaagaaggtccttttctgaccccattcccagaacaagctcacaccaagaaaaatgtatgaggatgttcatgacagtcatgtttataagagggaaaaactggaaaccatatacaggtcaattgataggggattggttaaaaaattatggcaaaaggtttgtgtgtactgacatggaaagaatttctacaattggttgttgagtgaaaaaagcaagtttcagaatagtatatattgcatgatcctatacacacaccaatcttttcatggcatgtgaatgtgttgtgtgtatgcctgtaaagccatgaaaacaattcgcaaggcacactccaaaccttggtcagagaactctgtagaactggagaagaagggaaatacatattttttacatttaagtatatatttctctgtatttctttatattctatgatatatattacttttgtaatgtaaaataaaagaaattaaaatattttttaaaaagaaaatgccaatttcctttggttacactgcacagtggtaaggcaagggttgtagctgagcacagagcttggcatggagtagctgccgactgaaagatgggtggaaggataggtgaatgaaccagtggatagactaagagatggaaatgtggatggaaagatggatgaatggagggatggatagatggatggatgggtagatggggtggatggatggatgggtagatgggtgaatgaatgggtagattgatgggtggatggatgaataaatggatgaatggacaaatggatggatggatgagtagatgggtggatagatggatggatgggtggataagtagaagaatgggtggatggacatatgagtgagtgggtagataaatgagtgggtggatggatggataaatgagtagatgattgaatggacagacggatggatagatggatggattcatgggtaggtgggtggatgaaagagtagcttcatgggtggatggatggatggatgggtggatggatagattaatggatgggtagatgggtgagtatgtggatggatggatggatgcatggatgcatgggtggatggatagattaatggatggatgggtgaatttgtgaatggatgaatggacagatggatgcatgggtagatgagtggatggatggatagatgagtggatgggtggctggatggataaatgaatgggtagatgggtggatgaaagggtaaattggtgggtggatggatgaatggatgggcggatggatagatgaatggataggtagataagtgagtgtgtggatggatggatgaatacatgaatagacagatgcatgagtagatgggcagatgaatgaatggatggatagatgagcatgtagtttagggtctgacacacagtaaacacccaatctgttagcaattgtgaaagtttacttcttctcaaagtctggggcaaggcaaaagtgttgagaaactgacattataacaatctgaaataaggaaaatggctgagctatcacaaagcactcagtgtgaatgaacatcccctcatgttctagggttcctcagagacccttgaacatgaggggatctgggtctgactccaagagaagctgtgaaaaaaggtaggagccaaagagatatcagaaggctggggagagagtggggccatcaatatctgcttatgcatgatcccatttaatcttcctatcaatctcatgaggcaggtgctattatgaggtccatttcacaggtgaggaagcaaacacagagaggtgaagcaatctgggcaatgtcacatagcaaacaaagagcagagccaggctgccactcagatctggctcatcccaaagtcactgattgttctcccacagaccccatatgaccaggcgcccctgccatttacctctgggtctgtgtagatttctgggtctctctgggggctcaggaaggggaagaggaggaggcggtcaccacgtcgcaggttgaattctcgcccgtctgccatgggcatggccaggtccaccacaacctcgcgggtgatgaagggggcagctgtaagcctgaggctctcactcagcacgctatctgcatggggcaggtgcaaggaagagtcagcgggctatcccttcacctgctcatatgccaaccccagctcttattttacagaggaagatgaagaggctcagagagggtgcctgcctcgcccacacagtcacatagcaaggtgaaaaaggacacacgatgacatgtggtctctgtggtccctcagagacgtttgaacatgagggtatccaggtctgaccccaagagaagttgtgagggaaggtgggagctagggagatatcagaaggctggggagagagtagggccatcaatctctgttcctgtctgcccggcatatatttctcttctggaaacgggcccctgattttcctctagggtccacccctctctcattctcaggggttagactgctgcttctatgctcaactcctgggatggggctgtgactggccaatcagagcatccctctgagccctgtgattggttcaggatggacacatgacccaaagaaagccaatgagacacagtcttgggactcttggtgggaacactgtaagagattcagagtctcacagagccaggaggaagtcagccttgagctgccaacagctactgccagcctgagactggagccaacccagtgggaaacagggctgagaggtggagaggaactgagtagtcctgacgacattgttaaagtgcatggatccacctgtgcctgaagccaatcctctgggctttttagtgacatgtctcaaagtaccttttcaccttagtcaattgaagttaggttttctgtcacttgacccctagctgaggctggagtatggagatgccaggtgtgtgaagataggaggcttagggagaccctaggtcggaggacacactgatggaccctggaagacaggagtccatgttggggagggctttgggggtccatgatgacgcagtcttaggggctatcttggagggtctgacgatctcaccaagcacaggtgtgctgtctagaaccttctgtgggagagtggtcgtctgcgagacaggctgctccgcttgccaaaggatactctcgagctctccgcggacagcagccagggcttcaggattcttgagaaggaagagcaggagccagaaggcagcgggacccatattcccctgcaaggagaagggcccctgttatgccattatgagggcagagctgactcgtctctgccagggacacagctcgggccaagacagaggggccagtaggcctgggttcccactgctgccaaacacccaggcatgaccagtgtctatctccagcctcaggacatggccaaaactgccctgtggcccaaaatacctacttcaaggccactcgtggcatccctgactgtgtgcaaagtcactaatcctaggtcacacaggtaatcttcatagctaatcagcaaaacagtgtcagtaataggaacagggtatatcagttaagactgttcacatctgagaatgatcacattgttggccccaattcttccccaatcgcagaatccacgctccttaccatgtgaatttgctgttcctcctattcaagagccagagcgtatttcccctgccctttgaatttatgctcagccgtggacttgctttggccaatagattgaggtggaattgaaggaacagccactctacgcctaagccgcgagagactttgtgtttccacttgctcggcaagcccactgatcccaagaggaggatgagagactcatggacagagctgagctgccccaatgagccagacccacagacccgtgagttaaataaatgctgatgggtgtatgccgctgatgagttgttatggatgtttgttatgcaacaatagctaactggtgtgatatctaaagatttgcttccaaatataatcattcttgatgtagtttgggaagcaaaaagttccctatatgctttgtatcttcaaattctatcagtcacttgaagaataaatgtgtgtgtgttgtgtacgtataaaacaaagccgcaatcatcattgatgactgaaagctatgaataaaaattatttaaacttcccaatagataaacacttaggaaaacgagtggaatttcttgcttcaaggcttcagtcttagctgaacattttcatacacattttagcctcagctctttggtatgtggctaaaatgtgtatatggcaccctttagtgatccagatatgggaagaataccaactaatctcaatttgggggaaggtttttgtctgccgtgactattctattcaatcataataatggaatattaaatcatcattaaatatcatgtttacccactaatttcattacagacataattacacatgggcaaaaggacatatgcacaaagataattattgcagtgctcatgtaatagaaaaatgctggaaacaatctcatgtctatcaataagagatcaatgagatcaatgaagatccatccattggatgatgtgatgcaggaagtcattaaaaagaagctggctctgtgtgtaccgatgtgggactgtagccaagacacacagaagcatgcaaacgcaaggtgcagggtggtggctcagcatgctgccatttgtgtgtttgtttaaagagaaatatacatgaagaagtacagaccatctctttttttttttgagacagggtcttgctctgtcacccagggtggaatgcagtggcacaatcatagctcactgcagcctcgacctcctaggctcaagtgatccttctgccttagcctcccaaggagctggggccacaggcatgtgctacccagctaggttttttttttttttttggtagagatggaggtctccctatgtttcccaggctgatctcaaactcctggcctcgagcagtcctcctgccacagcctcccaaagaagcacagaccatctctaagagacaccagaaacgggtaactgaggttaccttgggacagaagctgggaagacaagaggataaggaggaaggaggctgactttccttgcaaataccttttaaactgttcaaaattttttaatggacacactaattttaagtgaaacagaagccacccaggctggagtgcaatggcacgatcgtggctcactgcaacctccacctcctgggctcaagtgatcctcctacttcagcctcccaagtagctgatacaagcatgcaccaccatgcccggctaatctttctattttttgtaaagatgaggtctcactatgtttcccaggctgtatccaaatcatttctacagtgatgtacaatgtcatgagagatgctcatgttacaatattaaaccaaatagaaggttagattaaaacagctgcatgatcttaaccacagaagaaaaacctatggggaaaggctggaaagaaatgcaccatagcattagtgatggtgagatagattttgccttcctctttagtgcccgtgaggccaggaggaaccacactcctctgctcaatacttccatcacgcaggtgccattattaggccttttactgaaaaggaaaacgaagtactccccggtcactacccactgcccagcatatagtggaggctcactgatatttgtcaaataaacatctgcatccctttggattagaggtggagctccaagacagcctgggaggtgggctagaagatccctggactgagaccaggtagaggtgggttcaaatcccagctccccactttctgtgactgtggacaagtcacgtccccctttgggtctcaacactgggggtaacattgccacctcctgggtggacgcaagggtccagtgaggctgaatgcaagcaatcccacacgtgctgcgcccatagtaggtgctcagaagtggttactcctcccccactggcccctcccctggatttgaaaacaagtcgggggggcctccggccctttctgagagttccaccagcacctcaggtccagctgacacagcaaggtcacctgctgtccatcacttaaatagccaggcaaatgcggatgataaataattcaacaccagcttagctcagcgccaaggccattttatctggcccagatggttagatgggggccaccgctcattaattaccaagcaggagtggaacacatgggcgcttggctatctctgcctgcaggaaaaagctgtggcaagttagggaggtgaccaagaccgccttttacccaactgcacagatgtgagtgtgagtgtgtgtgtgtgtgtgtgtgtgtgcacacacaaccataagagatcctgaatttgccaccctggaatttgagctttcacccacggagccttgcctccgtttactcaggaagacacttcttgtttgtcttcattccctcctactgcagccaaaggccatgacccaaaagcagtgccacccctgttctagctttcctgtgaatggcagtggctgacctctgggaggcactgactgcgggccagaccacacccttggtgattcacatgctccttcttgttgcctcctgacaacatggcccatcagtggaagtgggggacttccgctgcccgctcctgcctgcatccgcttccttgtcgttggtaacagcaccccactttccttcaaagaaccacctcctcttaagtctaagtccatgtgggccatccaggactgacccatccttccagacttcaagtgtgggcatgggacccaggcggaggcactgagtgatccacgcagagtggggcatatgacgtgggctgggccagtgagtatcagtcttgggagctgtgctagaatttaggggaagggaagccctcctccatgggattgctaaattgcctagagctactggaggccattgtagtcatcccccagggggagaccctctgaggatgtagcctggcagaagaagggagacctgagggatgggggtcacagattgtgtttcttttaatttttatgatttagaagattccaacggaataaaagaatatcccgagtgtgatgatgtgttagtgtaggtcataaattgtaacaaatgtgccactctgctgagggacaccagcgatggagaggcgaggcattgggagaagggggctaagggagatccctgcacctttccttcaattttgttgtgaacctaaatctgctgtaaaaatagagtctatttaaaacaaacaaacaaaagccctaagtgcaatgtgggattgtggattggctcctggaagagaaaaagaatattagtagaaaaactggggcaatgtgaataaagtatagactttagttactagcaatgtcccaatgtgaatttcttagtcttgatgaatgtattgtggttatgtaacattagggaaagctgggtgaagggtatttgggaactcctgtactatctttgcaactcttttataatctaaaattatttcaagataaaactactgaagacaaaaaaaaaaacaaacaaaaaaaccaaccctctttacagatggtgaaacttaagcccagaaaagtgacttgtttgaggtcacataactagtttagtggcagaggtgagattccacccgagtctgtctgactctcaatactgtggttttgctttctactccgttgtcagatgcctcaaggattcttctcgatgatcactatctcagcggagctatgtgcaggcccagcagctcccgtggccccctcccctacctctcaggaccacccaggaatttccagggatgtgtggctgtggctgctgaggatgtgatggggtgaaggccaagccagatatcgggaaggaagagaaggatcagatgtgatggatggggctgagggacatcatgtcaatcaatggtttcagtcctggcattaccagcatcagtgggctcagagctggcagggaagcctgacctgtgtttggaaactctcctccgtctgccccccaccaccccaccccaccttcccttacagcctcctcttccccttgcctggaccttaggtctcggcccacagagtcctccctggatgcctgagactcccactgctccttccatcactctcgattccaggttcaggggttctggattcaggaagctgttgtgaggatcctatgagatggtggttgcaaagtgctcaacaggatgcttggcccagggtaagtgctcagtatcttttgagattattattcctgactcatcatctccgacctgacagcagcaatcacagctaccatttttcagcctctctgcagcatctgacccagcttcccactcccggctctcctcccaccttcctggcccctcctcctcacccttcccaccactggagagccccagggatgcccccttcttcacccaccctcgcctgcagtatctcctccagtcctgaggatttaaactcctctatgctgacaactcccaagcctggacctcaaacttgaactccagactctcttctccaggtgtccactcccccatctccatctcaaattcaacatacccaaagcccaacccccgatcttctccctgaaacttcctcctcccgccatctccctcttctgcccatggctctgccatccctcctgtcactcaggcccaaacctggattcatccttgatggcctcccccaaggtcccatccaacagcggatcctgttggctttactttgatatatgttcagaatctaaccacccctgaccctggcccagcagcaccctctcttgtctggatcctgctgctcctctctgctctccctgcctctgcttccccaccccctacagtctcttgtcagcgctgcagccagaatgatccctctaaagcgaaagacaggccaggttcttcctctgctcagagccctacagcaggcacctgtctcactcacagtaaaagccaaagccctccccatggcctacagggacctgtgtggtccggcagctctgcctccccaccgtgtcacccttagtcctgcctcagggcctttgcacttgctgctccctgcctgggaaacttcattctatatatttacatggttcacccctcacttccttcagtctctgctcagatgtcacctttcagtgaggccttcctgggcctgccttcctgctgcatctcttctccatagaacacattccctctaatacttttttttttttttgagatgggagtctcactctgttgcccaggctggagtgcagtggtgccatctcggctcactgcaacctccacctcccgggttcaagtgattctcatgtctcagcctcctgagtagctgggattacgggcctgtgcgaccatgcctggctaatttttgtatttttagtagagtcagggtttcatcatgttggccaggctggtctcaaactcctgatctcaagttatctgcctgccttggcctctcaaagtgctgggattacaggcgtgagccactgcgcctgacttctaatacattttagatgcttacttgtttgtttatttatttatttatttttgagacagggtctcactatgtcacccaagctggagtgcagtggcacaatcatggctcattgcagccttgacctcctaggctcaagcaatgctcttgcctcagcctcccaagtagctgggactacaggtgcgcaccatcacgcccagcttttctacaaaaaaaataaggtagtttttgcagagatggggtcttgctatgttgcccaggctggtcttgaactctaggactcaaatgatgttcctctctaacttcccaaagcactgtgatgacagcttatgtgtttattaattgtctatcttctcccaccagaatgccagctccctaagggcagggatttttgtctgttttgctcaccgctctatccccagcttctagaatggggcctggcccatggtaggtgctctaaatatttgttgaagatgtttcttgagcacttgttatctgcaaggcacagttacaaaattgcacatgtattcctgcctcctttcatcttcacaaccacgtcttgaaacgggtgctaccatctccattttacagatgagtaaaccgaggtgctcagaggttaagtgactgacttgccaggaagtgtcaaaatcaggattcaaactcaggctgggaggtcacagagcctgtgccagaaactcctaggccaagtaccctcttggctccactcccaaaaggcccttgaaaagttttcccacctgcctgaattctggacgctgtcaacgactcaacctcagaggacatcttgtccccagctcctgcccagctctcctggccctgccaaaggctgttccctggactttctgccactcaaacccctcagccagcatccagttttgctgacaccagtcattcccacgagagttctggagacactttggagctccaagtcatctctgcacataaatatgttattaggcactgatgtgggggacaactgccaattgatcccagtccccaccccttgccagtctctgcctgcaaggacagttaatggctctgaggaaactaaaaataagctgcaagtcgatgggagaggaattacccagaaatgtcagcttgtgcaactgtcaccgtcgaagtggggccaagagaaagatggggcttggggatcaggagagagggcaggaaccaggcctggagctgtgcagcatggaaggctaccatctttctctcactccaatatctggtccatgaccaagtccactgactctgtcttcctgaaatttccaaaatctatccacgtcctcatcacctccatggccaccacctgaccctgccaccacagtttcctccttgttgccctgtttttgcttttgcccccaagatcctgtccctcctctgctcagaactctcccaggcccccatctcgcccagagaaaaatcccaagtcctcatttatgaggacccacaaggccctcagtgacctcttccctcggtctcacgccccctccctcactctgcttcagctgtgtgatccaactctactctgcaagatccaaccccagggcctttgcacttgctgtttcccttatttggaatcttctatccccatatcttctccaagtctctgaatctagctttcttatcatccagggctcatctcaaatatctcagggaggcctccctgaccaccccagctagagcagacccgaaagtctctctattcacagccctgtttcatactctacatatcatcatctaaaatcaccttgtatatgtttccttgactctctgccccctgtcctcctgaccccccaaatggtaatcgacacaacacagaatctttgaggtctacggtaagtactcaaaggattttttttaagaggtggaatctcactatgttgcccaggctggtctcaaactcctgggctcaagcaatcctcttgcctcaccctcctgactagctgggactacaggtgcacactaccatgcccagtgtctcaatggaacttctaaacaattcttcaaaataactggtctgcacacttcaaaaaatgtaaatgtaatgagaaacaatgaaacgcacagaaaccgtgccagattaaagaaaatgggtcgggtgcagtggctcatgcctgtaatctcagcaccttgggaggctgaggctggtggatcacgaggttaaaagatcaaaaccatcctggccaacatggtgaactcccatctgtactaaaaatacaaaaaattagctggacgtggtggcatgcgcctgtagtcccagctattcaggaggctgaggcaggagaatcgcttgaactcagcaggcagaggttgccgtgagccgagattatgccactgcactccagcctggcgacagagcaagactccatctcaaaaaaataaaaaaattaaaagaaaagaaaacagaagagtcagaatgactaaatgcaacgtgtgattctggattggatgctggaccaagatgaaccaaaaaggacattattgagacaactggcaaaactggaatacagattgtttattagataatgatcatgtatttgggctcattatcctgaaattggttattgtactgtggtcatgcaggagatgttcttgcttacactcaagcaattagggataaaaaagcatgatatctgcaacttattcccaaattatttcaataaaataatcccagtggggaaaagagagcataagagagagagagacagagagagagaaagcaaaggtggtaaaatgtttaaaactggggaatcaaggtgaggcatatataggagttcattaaactatttattaaacttttctataaatttaacatttttccaaattaaaaaaaaacaaaaacaaaaaacaaaaaacaaaaagaagctgggcgtggtggctcacactgtaatcccagcacttccagaggccgaggcaggcagatcacttgaggtcaagtttgagaccagcctggccccatttctactaaaaatacaaaaattagccaggcatggtggcaggcaactgtggtcccagctactcgggaggctgaggcatgagaatcacttgaacctgggaggcggaggttgcagtgagctgagatcgagccactgcactccagcctgggcaacagagcgagactctgtctcaaaagaaaaaaaaagaaaagaataccgaatgaatgtttctgttcgtgatgctatttgacagtaaaggaagtcagggaactggtttgggcagtgggtatgtgtgcacacacccacactcacatcagcacacactcacaaatgcacacctacatacacatgcacacacaggcatagtcatgtgcacacctgcacaggtgcacagacatgcacacacacatgcgttcatatcgcaaccacacatgcacacctgcacacacccacttgcacattcacacccacctgtgtggcccacagctgcagcaccagggcccgtgcctgcatctcctctgacacacccatctcctccaggtgcagcaggtaactctccagccatttgctccggtgggcccgcctggccagcctggctggggatagcagcttccacaggcgacttttgacactgcacatgtggtccttgtcccctgcagggacagagcacagagagtaggggttacagattcaccatcccacacccagggctggccaggcatgacctcccatgaggccaagggtcttctgaatgtcactcattgagggtggggagttcctgtgggaaagaagctgcaggacaggcccacagcaggaagccctttcaataccaaattgcttattatctgtcttacccccagtaaaaagaagcaaggggtcttgtctcctgcaggtgggagcctgatctatttcaatcacctctatgtccccatcacccggcccgtagcaggtgctcaataaatatgcattgtattagtctgttttcatgctgctgacaaagacatacttgagactgggtaatttatttatttatttattttttaaaaaataggtttaatggactcacagttccatgtggctggggaggcctcataatcatagtggaaggtgaaaggcacatcttacatggcggcaagcaagagaaaatgaaagccaagcaaaaggagaaaccacttacaaaatcatcagatctcatgagacttattcactacaaggagaacagtatgggggaaaccacccccatgattcagttatctcccactgggtccctcccacaacacatgagaattatgggagctacagttcaagatgagatttgggtggggacacagcaaaactatatcatgcattaaataaatggtagttctttccagagcaggagaaggaacactaaacactgagcagcattctccctccccagggtccaaccccagagcaatgccagcccatgtgcatgaggaggaggccactgtgagcaggctcagcacagcagcaatcacagaaagacatcagcaacaacctaactggcagattgggctggagtctcaaactcaactcactccagagaaggcaggccaagtaaaagagagacgggccagaaaggggccatggcacttagcccaccaaccagccctcggcaggagagggaaacaccccagcatggccagaaggcctgtgctttcaaaggaagctgataatccagacaattatgtataaccttctgatgttttttaaggttagcatccaagtaaaaagtttttaatcactgtgcagaccacagaagcatctctgaaggtcaactttggcccacagatcactagcgtgcatcaccattaaacagacaatggtgtgtttatgttctggaaacatacagcagtgaaagtgagttagtacattttacctacagacacagagagttcccaagggcagactggtaaggggataaagccgggcactgaagaatgacactatttagatattgttttcttttctacttctttttttttttttaaaatattttcatgaaccatacatgagccttaatatacattgttttaaagctccacggtaatgctatttatatgcacaaatataaagtttaaaacaaaaatataaaatataaaatttggttttctccgaaatcaccccttggaaaagtgagagtcattttggattgctctgaagtttcaaagtattggaaactccctcactgactcttctgaaccacaagccgtgtttcaggaagactcgccccaccagcgattctaaacctggctgcacctcacagggcatttgaaagggtcgaaaatgtagactatgttttttttttaaagtatgttggcttcattttcaaataatacgctgaatatgtttaacttttagacttcaacttgagctcattgttttacattgaaatgaatgtcaccatttcgggtgacatttcaatgtaaagcaataagcttaagtgttcaactgaaatacattatcttcctatgtttctccacttttcaggctctctgaagaattacctgggagctcttaaatctctggatgcccaggtgccaaccccagattgatcatgtcaaaatcacgtgcgtgggaactgggcatccagaggtttaggcctgcagggcgcgggcagtgttgaaaccacctcagttgatgccaactctggatacttctaagcatcatctgatgggatggctaaaaaaagaggcaaagaaatttaacacagctttagaaataactggcattctttgaagtctgaccacacaactgcaatcttgaatatcactgtaaacacggcgtttacagatgactttaaaaagcaaggcaggaccattctccacttttcccctgtgcctacagcagttctgagtacataggaggcactctatatttgcacaatcaatgaataattaagcaaaaaaggtaatgcagtatgaaaagacagctgacagaaagtgagaaaatatttgtaaataatatatctgataagggtctaacacccaaaatatataaaagaactcctacgactcaacaacaataaaaaacaaacaacctgatttgaaaattggcaaaggacttgaatagatatttctccaaagaagagatacaaatggctgataaacacatgaaacaatgctcaacaccattagtcattagaaaatgcatgtaaaaaccacagtgtgataccattcacaaccatgaggatggctactatttaaaacataggaaataagtgatggtgaggacgtggagaaattggaacccttatgcattgctggtgggaatgtaaaatactgcagttgctgtgaaaaagagtttagcagttcctcagaaagttaaagaattaccatatgatccagtaattctagttctaggtatatagcccaaagaactgaaaccagagactcaaacagatactcgtgcaccaatgttcatagcagcattattcacagtagccaaaaggcagaaacaacccaaatgtcggttgataggtgaatggataaatagaatgcagtatatacacacaatgtattcactcttaaaaaggaatgaaattctgacgcatatgccaggcatggtggctcacgcctgcaatcctagcaccttgggaggccaaggtgggcagatttcctgggctcaggagttagagaaccagcatgggcaacatggtgaaaccctgtctctactaaaatacaaaaaaaaaaaaaaaaaattagccaggcatggtggtgtgtacctgtaatcccagctactcaggaggctgaggcacaagaatagcttgaacccgggaggcggagattgtagtgagctgagatggcgacactgcactccagcctgggcgacagagactctgtctccaaaatctcatataatgagaatcctagaacaggaaattcagagacagaaagtacaatagaagtatactattcgacagaaagtagaatagaaagtagaatagaagagacagaaagtagaatagaagatatgtcgggctgggaggaaaggcaggtggggaattattgtttaatgggcacaaagcttttgtttagaatcatgaaaagtttctggaaatagataacggcatggttatacaacattgtgaatgtatttactgccactgaattatacaattaaaatggttaaaatagtatattttatgttatttattattttaccacaatttttttaaaaggcatatgaaggtcatttggcaaaaatgagtcaaagatagtgttgtataacaaagaatttgcattctgggcgggtgcagtggctcacgcatgtaatcccaacactttgggaggccaaggtgggcagatcacttgagttcaggagtttgaagccagcctgaccaacatggtgaaaccccgtctctactaaaaatacaaaaaaggataagctgggggtggtggcaggcacctgtaatcccagttacttgggaggctgaggcagcagaatcacttgaacccgggaggtggaggttgcagtgagctgagatggagccactgcactccagcctgggtgacagagtgatactcaaaatacaaaagaatttgaattccaaggtttcagttacccatggtcaaccatggtccaaaaatattaaatgaaaaattccggacataaacagtcataagttttaaattacatgctgttctgagtagtgtgttgaaatcttgtgccatcctgctctgtcctgcctggcaaaaaacacaggataaaaatatagcagtgggctgggtgcagtggctcactcctgtaatcccagcacttggggaggccgagacgggcagatcacctgaggtcaggagttcgagaccagcctggccaacatggtgaaaccccatctctaacaaaaatataaaaatacaaaaattagccaagcatggtggtgggcgcctgtagtcccagctactcaggaggctggggcaggagaatcgcttgaacccaggaggcagaggttgcagtgagcggagattgcaccactgcactccaggctggacaacagagcaagcaagactctgtctcaaaaacaaaaaaaatatatatatagcagtgattggatcatggatcaaatcagtttacatttgtatatcccttagagcagtgtagaggacacactaaaccttacccaagagttatctattgctgtgatatattgttagcacaaagcaaagtgccagcaaccacgtgtttagtatgcatttgtggaaaaaaagaaaaataagaatatagtcacattcacttgcacttgtgtgaaggaactctagaaggatccatttgaaactaataaaactaatcaattatgagcagtgggaattggtggaaggggatgtgacaagaaaaggaaggagacttaccactgttattacttaatttttttccagccttgctgaggtataattgacaaaggaaaattcttatttaagttgtacaacatgatgttttgatacacaaatatggtgtgaaatgattgctgcaatcaagctaattagcatatccatcaccttacataggtgcacactcacacgtgcatgcatggtgagaatacttaagatccactctcttagcaaatttcaagtatacaatacattgtatacttgtatattaaatctccagaacttattcattttataactcaaagtttataccctcaaccaacacacccccatttccccacctcctgagccctggtaaccactgttctactgttcctctgaattcaacttttttagctcccacgtataaatgacataatgcggtatttgattttctgtgtctggcttatttcacttacaatattgtcttccaagttcatctatattgttacaaatggcaggatttctccctttttatggctgaataacattctttcgtggatttacatacacagcagtcctgtcttatccagtttcactttccaaggtttccatcacccatagtcaaccatggtccaagaatattaaatgaaaaactccctaagtttgaaatcgcacaccattctgagtagcatgatgaactcttgtgccatcctgctccatcttgcctggggggtgaatcatccctctgtccggtgtatccacactgtagaccacacctgcccattagtcacttgggagccactgtctcagttatcacgtcaactgtcatggtatggtagtacttgtgttcaggtaacccttattttgttttcattacagtatatcgttataattggtttcattttattatgttgttaatctcttactgtgcctcatttataaattaaactttatcaggccaggcatggtggctcacgcctgtaatcccagcactttggaaggccgacgtgggcggatcacctgaggtcgggagttcgagtccagtatgaccaacacagagaaaccctgtctctactaaaaatacaaaattagctgggtgtggtggtgcatgcctgtaatcccagctactcaggaggctgaggcaggagaatcgcttgaatctggggggcggaggttgtggtgagccaagattgcaccattgcattccagcctgggagacaaaaacgaaactctgtctcaaaaaaaaaaaaaaaaaattaaactctgtcatagttatgtatgtataagacaaaacagtatatacagggttcagtaccacccatggttcctgacatccactgggggtcttggaacatatcccctgaggttaagagggggccattgtaccactatctctgtatctgttcatgcactgatggacacttagtttgtttccatgtctcagctgttgtgaataatgctgcaatgaattggaggtgcagacatctcttcaagacagtgatttcatttcctttgaatatatacctagaagagggattgctggatcatgtggtagctctatttttgattttttaggaacctccatactgttctccatgatggctataccaatttaaattcccaccaccagtgcgaaagagttctcttttctccacatccttgccaatatttgtcatcttttgacatttctaacgggtgtgtggtgatatctccttgtgattttgatttgcatttccccaatgagtagtgatgttgaacaccttttcatacctgttgccatttgtatgtcttctttgggaaaaatgcctattctggtcctttgtccattttgcagtcaggttatttggatttttgtgttttttgaggcagagtctcgctctgtcgccaggctggagtgcagtggcgtgatctcggctcactgcaacttccacctcccgggttcaagcaattctcctgcctcagcctcccgagtagctgagactacaggcgtgcaccaccacgcccagctaatttttgtattttttagtagagacagggtctcaccatattggccaggatggtctcgatctcttgacctcgtgatctgcccaactcggcctcccaaagtgttgggattacaggtgtgagccaccgctcccagatgttatttggaatttttggtattgagttgtatgagttccttatctattttggatgttaaccccatatcgggtatgtggtttgtaatctactttacatttttaatgtttaaaccacgcgaaataatttttaaaataaaataatagaaaatctggcaaaccccccaaaaataatttccagtgaaacatcatatactgtagagattcaaggaattcagtgcatatgggagtgaggaagagaagattctggaaaactgagcttggtggctcaacctggggccctgcagatgagcaaagctgtgtagttaaagggggagtctgcataaagccccctcctgaaatgtggtcgtgggaagaaagcaaatgttcgaaatggttacagcacatttatacaattcactacagacgttcaacaaaacagatacggagaaatgcaactatttacttccattcctaattatttcaatatttaggttgccccaaaaatcaaaaaaagacaaaattttaaaaatcttcccactgggaaaacagaggcttgctgtctacttgggattccagtacaatttgctattttgttgttttttttcttttgagacaaggtcttgctctgtcactcaggctggagtgcaatggcgtagtctggctcactgcaccctcaacctcctgggctcaagtgatcctcccacctcagcttcctgagtagttgagactacaggtgtgagccaccacaactggctaattattattattatattttgtagagacaaggtctgtctatattgcccaggctggcctcaaactcctgaacaaaagtgattctcctgccttggcctcccaaagtgctggattacaggtgtgagccactgtgcgcagcctcatgctgtattttaatgtctgcataaaggccaagtgttgttctgggaaacagagtagccgcaagccccagggagttatggagcatttgaaatgcggctggctcgaatgcagccacatttaatatagggtaggggagacactggattccagagtcagcatgagaaacaaaatgtaaaatatcttatcaataattttaacattggttaatgctaaaatgctaataatattttagatgtattggcttaaataaaatgtattattaaaatcgatttcacttctatttttcttttttagtgtgtctaatagaaaattttaaattacaaatgtgattcccattatttgtctatgtacagcactgttctagaaggataacagcaaacagatagcaatagttacctggggatagatttagagggaatgtggtcaaaagagaattttcctttttgaaatatttgatttttttttaacaaaagtcagaggagcccagttaagaggcccagtgctgtagcagagtgcctgaccttgaacaagtcacctcacatctcagcatctcagttttcttgcctgtaaattgggataataaaagtacccaccacagagggttatatacagatcaaatgcgttattaacatctaaagcacagagatgactgacacagtcctaataaacgctatattattaaataacaaatcttactgaatgttagcaaattattagcccaaggagaacatgttcatgaattgcttctttaattaagaaacaataataaattgcgaaatacagagcacaaagtttgaagacagagagcattgaaatcccagctcttccctttctaacgagatgaccttggccaagtcactttgcatctctgagcctcagtttcccccatgtgtaaaatgagggccatctagctcataggatggtcaggaggattcagaaagatcacacacagaacacacttggtatcggtagaagtttgtaaaatgctacttgctacattctctccattattacgaggtatttcttattggtgtgataaccggatgccatgaatgagggctgccaggcccacggtgattggcagcccaccaatttaaaccagattggtgtatctggtttaaatcccagagtccccatgctatgtagcctcggctgagcccctgcccatctctggacctcagtctcctcatccaaaaaatgaggacccagacttgaatacctctcaagttttttctgggaaagccctctaggccctctagatttgggggcatagtacagagaggcccccagaagacacatgtctttaaagtcttgtgttttacctttgaaatgcatcagagttttgcatcagactctgtgattctttgatataagaatgcctttttccccaaaacaatgttcaaataaacagccccccaaaataatccagtaaaataaatgttccagacagaagcactatgcttagctagggggtctgtttaactgtcccctgcccccaactccctactgtatgagaaacaccagactcaatggcctaagggttctcaaaggattaactttcttttaaaatatatttatactttaaaaagtgaaggaagaataatgtatgcatacagaaaaaaaagaagaaaaataaagaatctaagagttcaagtccacatcttgtaaaaaatgattttctctccaccccttctcggccttcccaaaggcaaaaatctatacatactcccacatttttaaaaatggccgggtgtggtggctcacaccggtaatcctagcactttgggaggctgaagcaggcagatcacttgaggtcaggagttcaaaaccagcctggccaatgtgatgaaaccccagctctactaaaaaagtacaaacacattatccgggggtggtggtacgtgcctgtaatcccagctactcggggggctgaggcaggagaattgcttgaacctgggaggcagaggttgcagtgagctaagatcgtgccactgcactccaacctgggcaacagagcaagactctgtctcaaaagcaaaaacatatatatatatatataaaatgtatgtatatatagtgatatagtataccctctgcctgcagcttgctcttttttgtaacagtagatttcattcactaccagtatgtcccactctgttttagatgcatagatggcctttagatgaatgcataatttatttaatcagcccttactgatggactttaaattgtttctagcatttgcaattataagcaatgtgacaatgaatatgtttgtgtatctgtagacatgtgcaagcatttatgtaggataaattcctagaagtggaagtacaggatcaaaggaatgtgcattttattttatgtttcagcaggttctgccaaaagaggctgcaatgcttcaagcaccccacagcaatgttcgggggctgctttgcccacatgcctctggtcccaattaagatgagaaatcaccgtcccacattgccacctgctgctcatattgagaaatgcatccttcctatagccagcccagggctgctcccagagtgatggggggagttcctctgcgtctaatcagactcctctggagcatctgtgtggaggaaatggtaatggagaaacccaatttttcctggggaagcaatcagtgctaggatgtggcaggtgctttatgcacaggattttgcagacagacagaccaagtttccacctaccagctgcatgtctatgacaagtgatctcacctctctgagcctcagtttccttatctgcaacatgggtatgtgaataacaaccttccagcatggatggcaagatttgataagctcaaatgagttcctctaaaaagataataaaggacacaaacagccggctcataaacaggaaatgcaaatggctactgaaacacaaaaaaatacaaaaattaaccaggctcagtggcacgtgcctgtagtcccagctacttgggaggctgagttgggaggatcgcttgagcctgggaggtcaagattgcagtgagccgaggtctcgctactgcactccagtctgggtgacagagcaagactctgtttcaaaacaacaaaaaaaccacacacacccagagatgtttcatcacagtagtcagtgatatgccacatagagccagatgtccttttttccatcagattggcaattatttaaaggctgataactgcatgttggcaaggttgtggtaacatgcaaattaaagcaataagttacccacctctgcccatcagattagcaaataaatggaaagattgatggcatctggtggagcagatttcttccctttaggtaggcggatgaattgctctgtggttttggaaatgatgtggcagaagcagataaaaattttaatgtatagggcctttgacctggcaaaaccacttctaagaagtgggcagagagaaatgaaataaccagatggtagaacagatacaagtacaatgaaatggtataaaagcaaaaagaaagaaagatagaatattgacatctgtcagagggaaatggctaactactgaaacagccatgtgagggctaaaaaaatgtattggttttttgtttttgtttttgttttgagatggagtcttgctctgtcacccaggctggagtgcagtggcgtgatcttggctcactgtaacctctgtctcaccaggctcaagtgatcctcccacctcagcctcccaagtaggtgggattacaggcgcttgccgccatgcccggctaattttttgtatttttggtagagatggggtttcgccatgttggccaggctggtcgcaaactcctgacctcaagtgatctacctgtctcagcctcccaaagtgctaagattacaggcatgagccaccgtgctcggccagatgtcttgtatttttaatgttaatttcatatccttctactttgctggattcatttattgctggagtttgttttattattgattttctggggttctccaggtacaatatcagatcatctgcaaataggaatagttttacttctttacccattctgatgtctataattggtttctcttgtttaattgcatcagctaatatctctaaaagatgtttatatcaacagagaagaatgtacagctatattgttaggttaaaaacaggttgtaaataacagatacaatttttctttgtaaacacagagacactgtagatgtgcatatttgtctctagttgtgagaacatacaaaataccatgaagggataataccaccatgctaacattggcttcacaggaagctgggcttggaagaaggggtattatattttatacaacctgtaactctgaattgttaaccacaagattatgattctctcataatgtaaacaaaatcaataatgcattaaagtttggctttttaaaaatatataagcaaaaggaaatgggtgatgaagtgtttgagcactgactatgacaatgcttaacctcgtatctggcacatagtaagtgctcagcaaacagtgctttttctttttttcttttctttctttctttctttctttcttttttttttttttttttttgagacggagtctcactctgtcgcccaggctggagtgcagtggcacaatctcggctcagtgcaacctccacccgcagggttctagcaattctcctacctcagcttcccgggtagctgagattacaggcgcccaccaccacgcccagctaatttttttgtatttttagtagagacagggttccgccatgttgtccaggctggtcttgaactcctcaccttaggtgatccacccgtcacggcctcccaaagtgctgggattacaggcatgagcctccgcgcccggccacagtgctttttcttgttacctcagccaattctaacagctgccctctaggaagatcctgctgttccccccattttgcagatgagatcgctgaggcacagagaaaacacacagatgctgggagggggagctggtaaagctcttcaagccgtcagagcccagactctgtcttagccactcccctccacggtccctccagagaaaggaactggggcaagtagaagtaacttgctccgagtcaccagcaaggaagcagcagcgcaggaattcaaatccaggcctctgctgcaagtctctgagcccagcacacacagcacttcccagccttctcaggacacttgtcagacatgcagttttccaagctctcccctggagacctggattcctatggacctggatggggctgagggacctacgttatgaagaagggcctgagaggattctgctcatcagggaagttgggggcacatggcccagggaatggcgccgcccagtggttcctacggcccctgcacacggaatcagccaggacactctaccaacactaagtacgctctgcagccacaaaaacagatgaggtagatttttacaaatcgatgtggaaatgctgtagacagggagttgagtgaaagctgtaagcggtacaacaattcttctagtgtgatatatctaagttatagaagtacaggctaggcagggcgtggtggctcatgcctgtaatcccaacactttgggaggccgaggcaggcagatctcctgaggtcaggagtttaagaccagcctggccaacatggcgaaacactgtctctactaaaaatacaaaaaataaccaggcgtggtggtgcgtgcctgtaatcccagctactcaggaggctgaggcaggagaattgcttgaccccgggaagcagaggttgcagcgagccgagattgtgccgctgcattccagcctgggcaacagggcaagactctgtctcaaaaaaacaaaaacaaaaacaaaacaaaaaacaggccaacagctaaaagaaatgcacgtgtgcactgaaagatacgtacaagaatgttcacaacaacctcttcctaacagctccaaatgggggactactcaaatgtctatcaaccaggaatggataaacaaattgtggcatatttctttaatgaaatactatacggcaataaaaagaacaagctgttggccaggcacagtggctcacgtctgtaatcccaacactttgggagaccaacgtgggaggattgcttgagcccaggagttggagaccagtctgggaaacatagtgaaacctcatctctacaaaaaaatttaaaaattagccaagcctagtggcatatgcctgtagtcccagctactcaagaagctgagggggaaggatcacttgatcccaggagattgaggctgcagtgagccgagatcgcaccactgcactccagcctgggtgacagagtgagaccctggttcagaaaaaaaaaaaaaaaaaaaaaaaaaaaaaaggcatgctggctcactcccataatctcagcactttgggaggccaaggcaggaggatcgcttgagcccaggagttcaagaccagtataggtaacatagcaagactccgtctcaaaaaaattgtttttaagacaaaaaacaaaaaataaataaaaactggactattgatccatacaacaacctggatgaatctcccaacatcaagttgagtgaaagaagccaggcataaaagggcacatactgtgtgattccatttctaggaagctgaagaataggcaaaactaattggaggtaaaagaaaccagtccagtggctacctcgcaggggtgaatactggctgggaaagagcataaaatgtttagatccacttctcagtgcatttatttatttatttatttatttatttatttatttatttaagacagagtctggctctgtcactcaggctggagtgcagtggcgtgatcacagctcactgcaacctccaactcccaggttcaagctattctgcctcagcttcccgagtagccaggaatgcaggcacccgccaccatgcctggctaatttttgtatttttagtagagatggggtttcaccatgttgaccaggctgatctcaaacgcctgacttcaagtgatccgcccacctcagcctcccaaagtgctgggattacaggtgtgagccactgcacctggcctctcagtgcgtttagatgtgtgtgctttcctgtatataaattatacctcagtaaaaaacaagaagttaaaagcttcaaaaataaaataaaaataaaaataacacacatctgtgtgtctgtttagagaaagtgctcccaggatgtactccaagctagtgatggtggttgcctctgtagagggaagtggtgggctgaggctggggagaaagtggagcgctcttttattcttccctgtaaattattctatatggcttgaattttttataatcagcacgaactacttgtaaaaacttttaaagcaactcaaaccttaaaacacaaaaaggaacacacacacacacagagattctccagccccactctaaatgtgctgaatcagaatttccaccaggaacccaagctctggtccaagccctggctccccaccattgcgctcttgcatacccccagtgatggggatcttactgcctccctgggcattggatgtctttctgcctgtgttgcctctggtcctctaccttgaattgggctccccctctgggtctttccatcctcccccccacccactggggcccccatggtgcttacccactgacagggagccacgggccagtttggggagcagccggtcgagctggcgaaaggtgtggaagacatcagctgagtggacgcggtcctgggcctggctttcatgggtgcgtggcagcgcctcaattccgtaaagagtcaggtagccggctctgggggcggcagacagagggtcaggggtcctcctgggacactcatgtgtggccacagctactcacaagagcttcattcatacacccagtgagcaactactaatcctactgtgcgccaaagaccattctgggcactgaacagtcggcagtgaaaaaaacaaaaatccctgtcctcaaggagctgacctctcagcacagggagacagacaacagacgagaggatgagtaaaatgaataatgcgccagctggtgccccgcggcactgtcagacacaaagctgggtagcaggatgggagggcgggggctgtggtgtcaggtgccaggtgagggaggggctggtgtcaagctgacagctgaaggctgagaaggagtcagccatgggcagagcagagggaggggtaggaagcagagcaagcaccaggtgtgatgtcctggggcaggagggagcccggtgctggggagcagcaaggaggctgatgaggctgcagcagagagctcgaggggacggtgctgagatgggggcacagagaaggggaggagatgcctgctcccagggagggattcagggaagacttcctagagaagggagggtctgagctgagatctgcaggatgatcgggggaagcagaagaggaacgtgttcaggcaacaggcacagcctgtgcaaaggcccagagctgagagtgcaaccgtgcctggtgggagaggtgccagctgtggctggtgcaggcactggagccggggtgtgaggcagaggatgggagggcctgggctgtcagggctggccacgcaaggcaggcatttgcagcagtgagaaggttgtgcttgatctgaggggctctgggaggcccgagaaggaggtcagggcctggtcaagtgtgaaaaagggtaagacatgggagctagcatgagctctcatgtgctctcactgaggcacacttacgcacacgcacacgcacacacacaggaccacgctcagaggacgcgccttcacctccagccccctttaaatgccccaggagtccagccccagcccagcgggctgacctcagtcctgggagggaaactgcaggctttcattttgtcatctctgcctcagcagagagtcacaacaaagagacgcaaccaaagccccggggcctcaccctctcaccctccccttgagctcctggatccctgtgcagacaaagaccagagaccaggatctctcaggagaggggttttcccagatgaagagagaatggaagcaggaatgagggtaggtgggggccgagagaggcctgcgtggtccctgctctgtccctcacctgcacagtggtggcagaagttgtaaaggtgcagcccacacactggattcagtccacaaatgtgttttatcaagggagttcctaaaaacaaactaaagcttccttcaaacatttggggaaactcacacaaaatccggatttcctgctcatctcatcttgaaaaaggaatctggctgacctgcggtcccacctggaaacctagcaggagcagagttgcagccgccccttttagacagacacgtgcttgccaggccactgcggtactcccaaggccctgtggtctcggtgacactgcagttgacactggtcatcatttatcatcacacttgcactgttgttttttgctaactcagagaaccatttcccggtacatatatttctaccaaaacaggcaatgaaaaataaaccaaaaaagtaaaccggccgggagaggtggctcacgcctgtaatcctagcactttgggatgccgaggtggttatatcacctgaggtcaggagttcgagaccagcttggccaacatggtgaaaccccctctctactaaaaatacaaaaattagctgggcatggtggcggcacctgtagtcccagctactcaggaggctgaggcgagagaatcgcttgaatctgggaggcggaggttgcagcgagcagagatcgcgccattattgcactccagcctgggcgaaagagcgaaactttgtctttaaaataaaataaaataaaatgaaggaaaagaaaacaaaaagaaaaagtaaacccagaggaccacaaggttttgctctgtggaagcgaagccggcagctccatatcaaaagagcacggctgaagacaggataatcccatatgtaaatacacacacgacccacaggcggcgctagagccacaaagaaaaataaagctgaaccaagctgggtcacaggagggagccatcacgaaaatgggactcaagaaagacctctctgagcaggtggcgctcgcgataaggcttaaacgaagtggggtgggagccacgcagacctgtggggaacagcattcccaggcaagggaacagaaatagcaaaggccacaaagagagagcgtgcctgacctgctcaaggggcagcagagaggtaggtgggaggaggggaggccagggctacaaggtgaggacagaggagaactttgggtgtgactcagtgaggccagggccaacacaggccaggctggtgggtgtaagaggtggcacctcacagttcgggctgcctgaaccggcacccctttcacctctgtgtccctcccatccaactggcccattctctttgtatttcaggggctgctgattgatggcagtggaaaggcctacagctgccaagccagggggcaggagctccagcccaggcctcaggccctgaagacacagttaccgggttacaggtatggatttacgtctgattccccctgagctgattcccctgtgcctgccgctgtaccatggagcctagccagacccagctgcccctgagcctgcctctccccagcctatctctctctgacttctttgtctgcacagggacccaggagccaggagacctgggaggatcactactgtgaacttgctgggtggtttcagctggccctctctggacctcagtccccatcatacaatgcagggtggaccagaccagcatcacccacaccaattacagcccttgacactgtttgcaccaccccagggcaaaacaaaaagaatggggactgttcgtgtgctgagagctgtggctgagagtgcagactctgggaccagccctgtcctgaccccaacacaggcctctgggcaaatgactcaggctctccaggtctcagttttctcatctgtcaaatggaatatgtaaagtcctagcctcctagagcgattgtgagcattaaaagagctgagacacgccgagtctacacatatgcacacacatatcataaatatacccacatgcccatatgtgtcaacgaatgactgccctttatcctagaactatgttgctctaatttcttggaggggttgaaatgtccttttttaaattaaatttaaattaaattaaattctggttggttaagggcatcactaaaatcagggagctgtccttaacaccactctatccctctcactcacgcccacgctcccccatccccaccgctgccccagtcaaatcttccggcagagccagtgaactctatctccaaaagctacccaaattctcaccacctccctgggccaccaccattctctcaccttggtgacacctggcagcctcctgctaggtcctcctgcctccctctccacccctccttacccctacagtccatcctccatccagcagccagagggggctttcaaactaagttagatcatgtcctgcccctgtgcaaacccctgatgtcacccgatcttactcagcataatttccaaagccttccctgacctcccgactgcctgaggcctgcttctgcccacttctctgacctcctgtccaccttccctccttggctctttatgctgtagccacactggccgtctctctgagcttcctcccacctctgggcctttgcacctgctgtttcccctgcctagagtgttggcgtggtgggcactttgcagttaggtcttggctcagaagccagacccccagagcatgaccctgcctcgtcagtcggcctaagaaagccccccagatgctgtcaccccacccgtggatctctgtcatcgtgtttatcactctctgacataactcaattcggcctcccccactggagtgtcagctgtgtgaatttggggacttcatctgtcctgttccctgctgtatccccagagcctggattagtgcccggcactgctgaaggaaggaacgttcggttgtgcagtttttaacatacatttacaagaccagataaaaggttaaggtcccaagttgatctcccaaacattttgttttctgttctgtgaaatcccaaagtctggaagccacaggacaagatgacctctgaagtcttgctctgtgacttcctctctgaatgacctgtaaggtcccatttccagccagtgtctccttttacagttcatgagctaggtcagatgaacagccggggccctggtgcatggcgtctttcctacagtctttgctttgggtgtctcaaattgcttcccccacccacagagtcctcacggttcccttggccactgctcatggctgacacaggtcaaagtgccgggccccagcaggagggtgggggctgcacagcctcacctgagcaggaagctgtaggagaagtcgaggagacccatctcgtgccagccactgcctgcttctgtagcatcgcccaacagcactgcatggaggttggtatacatggcttctgtgagtgcctggagctctctgtggagaagagtcctgaggcaggaaacaaaagcatgaaaatttggcttccaaagggaaatacacacctacaggcacctccctccccaaacctaagggtcccagagctcaagctccccattggcaaagaggtcctgcggaagagtagcttaaataagaggatattattatgactgtcatcgtcaacaatagttcccatctgttatactgagcctaatctcatttcgtcttcagacaaacctgggaataagagttactattatgacacccattttacagatggagaaactcagaaacagagaggaaagtgacttgcccaaggtcacacagccaaagcgggactgaaatcctggtctgcccaactccagcatctgaattcttaaccaggagagtctttccctccctaaggcacacagcttggataagggacccatagcgttctggaagagaaggaactgaaaagcaactcatctctccctgaaatctaaagataggaagatctgttggaatagctgtggtgttccctgactcaggactgccaataagatgtgaccctggccaggcatggtggctcccacctgtaatcccagcactctgggaggccaaggtgggagaatcacttaagtccatgagttcaagaccagcctgggcaacatagtgagactccatctcaacaaaaaataaaatattagccaggggtggtggctcacacctgtagtctcagctactcgagaagctgaggtgggaggatcgcctgagtctaagagttcaagaccagcctgggcaacatagtgagattctgcctttacaaaaatagaataaatacacaaagaatcactagccagatgtgtagtaggtgcctgtagtcccagctactcaggaggctgaggtggggaggattgcttgagtccaggagtttgaagctgcagtgagctatgatcacaccactgcactccagcctaggcaacagagtgagactctgtgtcttaaaaaaagaaaagaaaaaaaaaaaagacatgacctcacatgagagtgacacaaggaaaaagggatgtgggctggagatctggtcccatcgtgtggacctgcacagagtgaggagaggccccgtctggaagagtgtggcagaagctggaagctcccctatactgagcctccatgatatggagtctacactgagccatgactgaggatatgattagaagccaagaaaggggtatcttgcatctaagtctaaggcctctctgctccttgtgtaggatctggaccaaaaaggatatccctacagcaagtgaagtggggtgtccatgggcggtgcacagcccatggtcaacagcaacacctagtggcagcaacaagaacagtgggagagtgccaatcagggccctgatctgtcatgcctgctgtttgggaagtaggatggactgctgtttgggaagtaggatggacacctttagactgagtaagccagaagtgcctgggtaatccaccagggcagggtttgcacagggcgtccatgaactcctgggtatgaaaaggtttgggatgttcaagttggaacatagtgggaaaaacgacagacatggctcatgactcatgtatgacaatgcatgtgaagggttccgcacggtgcctggcacattgtaagtgctcaatacatgggatctggccttcaatggaccctgacccagctcttctccccaccccactccaagcgctggtcctcagcagagacaagccctcaacagatgtggctgctgtgcccagaagacatcacgccagcttgtaagaaattccagaaaattcctgaggcaaacactgaaggaaactgggatcctccctgggtagcaggggcagattcagtgagctgtggattcctattgctaatgggacccccagggtccccctggaatgtcaggacccaggacactcaggctccaagcagctgcccccaggccaaggttcagaggaggcatcatgtctcatcaacatccacttcatcatgctggccttgcttcagccttaactatcttgcaaaacagtttcctagatgctcttcctaacctccagagggtattcctcctggagacagatcactgaagatcgccattggactgtgtgaactctgcaggggcggacacagggtcttatcagccttggtatcttagatgaaggagaatgcgctgtgaagtcagtggacctgggttcaaatcccagtcctgccacttactagcagtagactttgagcaagtcacttcacctctctgagcctcagtgtcctcatctgtaaaataaggataaaaatgcccacctctttaggctaatgcacagatatgaaagtgagcctatcagacacctggcctataatagctgccttcaaatggtggttggcaccgttctgcacaccctacatccagggcaatgaccagggtacaatgggtcctcagatgtctgctgaatgaatgcagagcaaacatgttcatctgttctcttattgatatgatgactccatatgtggctgggcatggtggctcatgcctgtaatcccagcactttgggaagctgaggcgggcagaccacctgaggtcaggagttcgagacctgcctggacaacatgatgaaatcctgtctctactaaaaatacaaaaattagccaggtgtggtggcacgtgcctgtaatcccagctacctgggaggctgaggcaggagaatcgcctgaacccgggaggcggaggttacagtgagccaagattatgccactgcactctggcctgggcaacagagagagactctgtctcaaaaataaataaataaaataaaatgattcctccatatgtttcaggagctgtaccacttctggctatgtggcctgagacaagtcacttctctgagatccagtggctgcatctatgaaatggggctgtaagttacttagcctccagcattgttgtgaagactaatgagataatgcatgctgcctggcagagtatggactcagaaatattcatcattccacctctctccttcattttacagaggaggaaacagaggctcagagagggaaagaggtttgtccaaagtcacaaagctagggagtgatggggctgggatttgaatttaggtgtggctgacccaaaccctggtctcctcctactaaaatcagggctgcctccaaacaaacaaacaaacaaacaaacaaacaaaaaaacccgccagagatgagagacaaagagttcttcttccacccaattcttttgggttgttttttgttttgtttctgtttgtgttctcaagacaaaatgtctttaccgaacatttgctttggaaccaagaataacttgggccacatgagtagaaatgagtcgcccaccctggccctcccacaggtgccatctccagccactcacagtttcatcctggccttttcatcactggggctgtaatgtggaagctgcacatcaaaaatcctctccatgaggaagatggcataggcatggaagtcgagcctggtgcgaggctcccacaccaccgcgtcgtaggagtgtgggtccaggagaacggtgacatacctgcccccaaccagtatctgtgggaagttgccagggatagagtgaggagtgtcactgtgaacagcagccgctctcagtggtcagggccttactgtgtgccaggcactgccccactggacagtaacacactatgttctcttatctatgcctcactaccacctaccaccctgtgaggtagggaccatcactcacccatttatagctgaaaaagtgaggcttagaaaggagaagaaatgtgcccaagatctcatagctgagaagtggcaggactaggactggaatttgggaatattgaggctttttaaaatcaaagactgtgttctctaccacctcactcttaagcacctgccatgattatcttggttattgccatatctccagtagccaggagagaaggcggcagatggatcctgtgcacatcatggatggatggatgaatggatggatgaatggatagatggatggatggttggatggaagaatggatggatggatggatggaaggaaggatggatggataagtagatggatgaatggatgggtggatggatggatggatgaaagaatggatggatggatggaaggaagaatgaatggatacatggatgaatagatggatggatggatggatgctgttgggtaaattccagtgggtggattgtagaagagtaaatgggcagatggatggattggtgaatgggtaaatgaatggaaggaaggaaggaagggagggaggaaggaaggaaggaaggaaggaaattgctgggtaaatacttgtggatacaatgttagatagatggataaatggaaggatagatcaatgaatctatgttggatggaaagatggatggaagggcagctagaggttggttggaaaccaaatgtaccaataaatgttgggtacatggatgagagaatgctaggtagatactgggtaaagtgaaggatgaatgttgattggatggaagttggaaggatacatggaaggtgggtgggtggtggtcgtttgaatagatgttgtaaggatggatggatgagatataaatagatgtatatccagtggggagacatcgaatactgaatatagctgagtgttgggtggatagtggcagatgaacagaaagatgcgtagataaacagaaaaatgaaagttggtggaaactgaccagttatccctcagtatccatggaggattggttccaggacctcctgcagataccaaaatctatggatgctcaagtccttgatttaaaatggcataatatttgcaaataacctacatgcatcctcccatatactttaagtcatctctagattacttataatacctaacacaatgtaaatgctaaataaatagttgttaaactatatttttagggaagaattacaacaaaaaagtctaaaaaagtttagtaccaacacattttcccccaaatattttcaattcgtggccggttgaatccagagatatggaacccacccatggatacagggggccaactgtatacagatgaaagttggatgaacattggatccatgagtggaagaactctgggtagatctgggcagacacatgaagggatagaagatggataaatgaattgacagatgtcgggtgaatctatggaaaaactgatgggtgagtggatagacggaggttgacgaatgaatgctgagtagatataaggatggaaggacgcttagtagacaccaggtggacaggcagaagaatgggatgggaagatggatgttgaacggatggaaatggaatggatagatggaggtcagctgcatggatatacaagtattggatagatattgagtgactgcataactccacgctgggaagagcaagagggagactgaagggatgatgttaggtcagcattgagagtgcagctggacaggcagctggatagaaagttggctcgaccactcagatggatgttggatggtggggtgggggggttggcatagggacatatgttgaaggaatcaacagaaaccagatatgaggcccagctgctcatccccatccctcccgaggcacaagaggcacttacagtaaagatgtcaccgtgcttctccttcatcctcgtgaggaagctggcagcatcttttccaaagtccaaggcataccccaaccaggggatgctgcccaggtccaggggaggctcaccaggtcgcctacagaagccatggcacttgtcaccatttgataaggcaaggaagggcataaagagtgtaggttgcagagtgtgattttgaatggagcagtcggggaggtaatctgaatggagcactcggggactattgcctcacctgctccttttctcttgtaacatgtggatgaccacaccctccctctttcccctccagcccacttttccccctttaaatactgaaaccctcagagtcatctttgaagaaaggcacagaccacagactgtttctgtgattctgtggtttttcttctccctggcattgtccttaaccttggtaaaataaacatctaaattgattgagacctagcttagatactttttagtttacaaattggcgaccatgaagggactccatgtaggtggccctggcctttgacaaatctcctgttggtgtttggtaacagcttggtatctgtcttcattggtcaaaccagtagggctgggagctccctgctgcagagaatcccgaatctctgaaaatttgagatctaagagagctacaatttgagagctaagttttattttgttgtacaactccttttctggagtattacttgcttccaacaaggaaggcaagttttcctgcttccatgacgatggagagcacgtaactcccttctggagtttcaactcacttccaacaaggaaggcaagtttgaagttttttttcctgctttgtagatggtaaagtgcaggccaggcacagtggctgatgcctgtaatcccagcactttgggaggccaaggcaggtggatcacttgaggccaggagttgaagaccggcccggccatcatgatgaaacgtcatctctactgaaaatacaaaaattagccaggcatggtcgtggtgcatgcctgtagtcccagttactcgggaggctgaggcaggagaatcgcttgaacccaggaggaggaggttgcagtgagctgagattgctccattgcactccagccagggcgacaaagcaagactccgtctcaaaaaaaataaaataaaatttaacctgaaagactggttcaggccgtggtgggaagtgggggtcagacatgactcattataccctccagcattcatatcaacacagaccttaagtctgataagaaacctttacatctattcgctctgaagcctgctacctggaggcttcatctgcatgagaaaactttggtcttcacaacctcttattataacccagacatttatttctattgacaataactcttgcaaccaattgccaatcagaaagttttaaaatccacctataacctggaagcaccccccacatcaagttgtcctgtctttctggactggacaaatgtatattgtcaatgtatttgattgatatctcctgtctccctaaaatgtacaaaccgagctgtgccttgaccacgttgggcacatgtcatcaggatctcctgaggctgtgttgtaggccatggtcactcatatttggctcagaataaatctcctcaaatattttacagagtttaactctttttgtcagcagtgtttatgtatgtgtgtgtgtttatgtgtgtgtgtatgcgtgtgtatgtgtgtgtatgcatgtgtatgtgtttgtgtgtgtgtgtgtgtgtgtgtgtgtgtgtgtgtgtgtatgcctttatgctttcttttttctctcctaggttcttgttttttgagaaaaagattttttcttcccagtcgactgaattctgttttctccatttacttctgcctgtctctccttcctcttgccgccctctgctgcataagggacctaaaataatttctaacagcctgggattccttaaagaaaacagagaaggtgccagactccttctggggagaaacctctgtttttccttatgaaaccctaagagtgtaaaaagacaagttcctctcagatcttaaactgattgtttttgtattgcgttatctgatttcttttttttttattaactaaaatagctattactacaggaactactcttgtgtgtttaagagagggagtggttaaaatacttagagaaatgcttttgtaacaaagtgcactgtaaaagcattacatggcttagtctcatgatatctctctccttttagagacccaggattcagtgtggactctgcccagagctcagaggtccagttaaaagacagagactaaatttaaatctacctatctaaataaagtttgtctcctcataaaatcctacagaagatttctataattttatgtttggcttgtggcttggcatccatttttaatctccctctaacacacccagtctctctctccctctttctttctctctctctctctgtctgtctctctctctctttagagatatacatttccctatctgattttcacccaagagttgttcctttagtatgcaagtttggctgacaattgcctagggtaatgaaacaggttatcaagaaattggaagtctaagatagttgtcctttttagacccaggagtcaaacactataacttaacagcaccaggacttaaaaacgatacagaaagtcacatggatgtaataacttttatttaaaattgttttatatcagctttcctaggcaaataaaaacataaaacaacttagacatattaagaaaagccaggagctttataacaggagaaaaaaaggggtcttatgaatcttatcagatctactgctgcctgtctgtctatgtatttatatgtcctgtatataatgtttcactacaaaaaaatacataagaggtctaataaattggcttaaagaaaaaaatcaaatactttatcagaaaaatagaaactttaagcccaaatggtttttcaagctcacatgacttaagtaaatctttaacaaataagctggttttaaaattattggtaaaataaaattagaaatggtttcagaattgtcaatatacattattgttttatatgtattagtcaaggggttatatatttatctctgctagatattataaggtgacaaaatttggcatgaggattatgaagctataaatccagcccaaaagagaattatcattgtgtaactttttgataaataaggcatttaatattgttcatttaatgaaaacagttaaatcctgagttattggcaaaaaacaaaaaacacacatgtatttaactttaaagttcttacttaagtaaacatctgaaattcacagctataaaaatgattaacagggaaataactttaaatagtgactatcacagttttcataagtaatctaggtaaactattttaaaaaattaattaggtaaatgtaatgaaataaatgcttataaataaatgtcatataattcagaatctaaagtgatattaaattaaataatagatacccattaaatgtctgggtcatttccaatttttccttaaaaagttacagaaaaacatttttcttaaaaaagtgttcttattaaaaggaaatagttttgtctaattcaaaggttgtttattaaacaacgtaaaaagaataagtaaataagaagcatgtaaagaaaattataaaggggtatctttggcaagaaaggttaaaagaaaaataattgtatatggaaagaatcccgtaaaaattttttgtcctaaaataaaatgattgatcatttacgaaagagagatgtttaggataaaacaggaagcatgttgtaaatggtttgtgtaagtcataataaggtttataaaaagagaatttatgaaaaacattttatgtgaacaagttgactataattaaaaggaaattatttataatagtctttctagagattgggttttgatattaaaaatgcactaatacactaaagaattggttagaacaaaattttcttaaggtattattttactgttaataacattacatgagattttaatttttttaactcaaaagttcaacttttattgcatcttgctattttcagctttctctcctctttgagaaggactgagagaataattctctccatcaacattttcgtcagctcatataaattttttccctcaggtcctaactgttgtagcctgatgctaaaaatgctttatcataaaggtctaaaggaaatgttttcatccaatataacattctgtgctcctggcatttcttaatatgtctaaattgttctgtgttttgatttgcctaggaaagctgatataaaaaaatttttaatgaaggttattacatccttgtaactttctgtaatgtttttaaagtcctggtgctgtttagttacagggctttgactcctgggtctaaaaaggacactgagtcctgctaaatcttaaacactgacagcagttaaagcatcatcttcagacctaggaggagatgacattcaaaataagctgcatttgtgagacatggagccagaaatgaaaactattcaacctctctaggcccagggactatcatggaagaggtgggcatatgagattgtaagggctgattctgagagattaaattagttcagagtttctctattaattaaacattaacatcaaaggcacactgatgcaagaccagcatctgggctcctgtgtcagattaacaaggttttcttgaagcattatcccaccctttaaaaaattataaaagtttagaaaatggtttatggaaattacatcttagggtcaagatgattaaaatttaatagatttgtttataagatttgagaaacaggatttaattggcctcatgctgtatttattagagcttattatttggaaaattaagtctcctctctcaaagaataaaggtttttaggccaggtgtggtggctcatgcctgtaatcccagcactttgggaagctgaagcgggtggatcacttgaggtcaggagttcaagaccagcctggccaacatggtgaaaccccgtttctactaaaaatacaaaaaaattggctgggtgtggtggcaggtgcctataatcccagctagtcgggagtctgaggcacaagaattgcttgaacctgggaggtggaggttgcagtgagccaagattgcaccactgcactccaacctgggcgacaaagtgagagtgtctcgaaaaaaaaaaagaataaaggtttttgccttttttctgaaatctctgagttatacctttggctaaatgaatgacttattttacaataacctgtgattctattttgtgatgtcaagtgttttaaactttctatatttgacaaactttccaaaataaaatagtcaattcagtccttttgacctcattaattttttggcattaggtcctctgaagtccaaaagagacatattcggcttatttggtaaaataaaatcatacaggaagcattgtcaaatatgaaatggtgtttaatcttctttggattatatttatataaatgagttgcttatataaatgagtatgtgttccaaaattgtatgagattcctgtgattctgatatgacttagtatacatcatcagtagtaattatgattattatgtaaaactattgaataccacagacgtaaccaaatttccttgtcaattgtgtctttaactatggctgttctaagacttttgtcatccacagttgttttagtttgatctttttataggtgatttataatcagctatagaactctgaggagtactcttaaacatgggcttctgacaaccttagagattgtgccattggaatagggagaaaaacttccaggactgtcatggagaactgatgtattcatgaggactgctaatcccatcttgagcagaacaggagttaattgcatgaactgaactaacaggagattgaaataatcttttatgagtttttgtttaaaacatttgttgattctttttgttttgttttacagagtcaagaaaactttctcttcttttaagctatttatagcttttaacaattcagtaaagtatactctcatgagaaaaatttaaaacagaatttctttctctttacctattttttccaaaacttggaaactatttgtgagtattcttaatttatggcaatgtagttatttgcctaagtatcttttttcttttataacagggcataattggagacactggttattttaccaaggctttaactggaatgacatattttcagactactttgagaaaataaggctgaactatagagctaataaaagcaccttggaaaaactggcttcatataccctgtcgtttacagggtcctgacctgtggaaagcaaagaatgtcactttttgaattcactcaattcatacaggtatctgcaggcacagctaaatccttggctgggtgtgaggcttttaaaaaggtctagactcagattccttatggaaaagcttccagcaaagccaattttaaaaagaagagagagctcatatggcaaatgatcagtcttgctgcattttatgaaaataatcaagccaagtataatataactaaaacttattttacaaataagttggtcctactatgattttgtctttaataaaattggggaattggagagagaaaagtcatgtttcaaaattaactatagtacacctgttattagagtctagacttgtctaatgtttttccatttttattattttccacaatttggactgaattctaaaaattctcctggctccaagtctccaaaagaatgttttcaatgttttcccttcttttttttttcctcccctcatttttcctgatgtgaaatcactaaaagttaagctgtgcttttcttaaagccctataaactgaacttaaactttggaagaaaataaaagcaatctctttatatgcagaaatcattttcatacctgcctactgatatacggacttgagagtaatatggcctctatcagttttccaggttcgttctttcttttttgtttatctgcttacttcctccttttttcctgttttctttctctcttattttctttgtgtgatgtgagacttcacaacctactaaaactgagctttcctaacaatgtgggacctattcgtctagaaataaaccatcctagacatgagagatcagacaaaacctgagaccggagattcattttcttctaaaatgctttctccaaaagatcttaaatagaaaaggggggcaggcatacatggtggttcatgcctgtaatcccagcactttgggaggctgagacaggaggatcacttgagcctaggagttcaagaccagcctgggaaacagagtgagaccccgtctctactaaaaattaaaaaaattagcccagcatggtagcacatgtctgtagtcccagctactagggaggctgagacaggaagatcgcttgagtctggaaggttgaggctgcagagcaaaaaacgtgcaggaagaaagaaaagaaaaaaaaaaagaagaaaagaaaagaaaaccagggagaaaagaaaaccggggagaaaggaaaataaaaactcaggacaccaattcactctgccatgaggaaaaaattaaactgaaagctgagtcatgcaagaagctgcctttcctactattcctaagcagatagctacagataaaagtttcagtatctccataggcagctactctatgttcaccttattttatgtaaagtgctgatttactgtgcatgagagaaatacatcattgactatcgccctacccgttccttttctcttgtgacatggggattaccataccttccctctttctcttacagcccacctttcccccgctttaagtattgaaaccctcaaagtcgtctttggagaaaggcacagacctctctactgggcatgtccttaaccttggaaaaagaaacatctaaattgattgagacctgtctcagacactttttggtttacaggtaccacttcacccaccaggatggccataataaaaacaaaaattttaaaaaaggaaaataaggctgggcatggtgtctcatgcctataatcccaacactctgggaggccaaagtgggaggatctcttgatcctaggagttcaagaccagcctgggcaacatggtgagaccctgtctctacaaaaaatacaaaaattagccaggtgtggtggtgtgcacctgtagtcccagctactcaggaggctgagtttgggggatcacttgagcctgggaggtggaagctataatgagctgtgactgtgccactggactacaacctaagcaagagaacgagaccctgttcccaccaccaaaaaagggaagaaaataagtgttagcaaggatgtggagaagtgagaaccctcatacattgctggtgggaatgtaaaatcgtgcagctgctttggaatgcagtctggcagttcctcaaaacgtcaagcatagacttactacaagacccagcaatgtaccctaaagaattgaaaacgttggatcttatacaaatgtatacactattattcgtaagcagtgtcagaggtgttcaaaccagagtgactccatgttgaataggagctgggtaaaatgaggctgagacttgctgggctgcaatcccaagaagaagttagacaatttttttttttttttttgagatggagttttgctcttattgcccaggctggagtgcaatggcgcgatctcagctcactgcaacctccgcctcccaggttcaagtgattctcctgcctcagcctcccaagtagctgggattacaggaatgaacaaccatgcccggctagttttgtatttttagtagagacaggatttcatcatgttggtcaggctggtctcgaactcctgatctcaggtgatccacctgcctccgcttcaccaagtgctgggattagaggcgtgaaccaccatgctgggccaggaagctaggcattcttaagcgcaggatgtttacgatcaagggaacacgttaaatcatgcttacccaacagacccaagacttaacagatccaggacttaacagacccaggaaacatcctgctgtcccgatattttatgaacaaaagccttcttagtttaagaataagttttgctttaaagataataatatagattcttatggaagattgttaggtaacaatcttttgtccccagcccttgtggtagaagagcacacctctcccatgatttttatcttctatataaacaagaagaattgtaactaaggcagacacattcctcctcttgccttcggaaacgccctggtctgtctatggtgtggccactctttcgttcctttaccttcttaataaacttgctttcacgttactctgtgaactcactctaaattatttcttgcctgagatccaagaaccctctcttggggtctggatcaggaccgctttcgggtgacagcagcattattcgtaatagctgaaaagtgaaaacaactcaagtgttcgttgagtgacgaacggataaacagaatgtggtgtatcaatgccacgaaacgttactcagccacaaaaaggaatgaagtactgattcatgctacgatgtgggtgaaccttaaaaacattaagcccagtgaaagaagccagacacaaaaggccacatattgtattaattcatttatatgaactgtccagaattgggaaatcaatagagatagaaagtacattagtggttgcccagggctggaggagggggaaatggggagtgactgctaatgggtacatggtttcttttaggggtgatgaaaatattctggaattagatgatggtgatgattgcacaacccggtggatatactagaaactattgaattatacacttttttttttttttttgagacggaatcttggtctgtcgccaaggctggagtgcaatggcgcgatcttggctcactgcaacctgcacctcccgggttcaagcaattctctgcctcagcctgccgagtagctgggattacaggcacccgccaccacgcccggccaattttttgtatttttagtagagatgggtttcaccatcttggccaggctggtcttgaactcctgaccttgtgatccatctgcctcagcctcccaaagtgctgggattacaggcgtgagccaccatgcccggccgaattatacactttaaaaggggagctggagggccgtggcatgatcatagttgactataacctcaaacgtttggactcacgcaatcctccagcctcagcctcccgagtagctggcactatatataggcacatgccatcacacctgactttgtttttctatttttttatagagacagggtcttgatgtgttgcctaggttgatcttaactcttgggctcaagcactccctgtctcagcctcccatagtgctgggattacaggcatgagccactatgcccagcccaaaagggtgaactaaatgggatatgaattatattccattaaagaaaaaagaaaacagggtggtgtgagacagtgaggggggctggtttacaaaaggtggtcaaggagggcctcctcaggagatgccacgtgagcaaagaccagaaggatgtgaagggagtgctctgggaggggcagggagaagagtgttacaggcagaggcaacagcaagtgcaaaggtactggggtgggagcatgctcggtgaggttttcgagacagcaggagccagcgtggctggagtggagaatgtggggacgagacgtaggcgatgatgctggagatgactttgtggaccacgagggccaaggccaaggtgggagtccggctcctatgccacgcgtggcagggatccactggagggtttgcagcaggagccagtaagtgatgtgaccacacctttaaagggtcataccagagaaagacaagaggaaggaaggagatgtgtcagggaactaccgtgacccccccaggagagcaatgtggtggaagcaatggccatggtccccggggagccagacctaacatctgagtctcccactttcagcacagggccttttgttccacacccagcagttcagggaagcagccacttctcttcctcctttccccctccctctctacctccctctgcccctgtctcctgctccctttttccctctacctggctgcccccagtataacccaaagggtgggacagctcgtgggcaggagcaaatggccagatttgagggccaaggctgggaaggatgggagcagaagcaaagatgaaatttgagggcctaggaagtgcctctcccaaccattccctcctctccccagcccatcccggcttctctagtcaaagaggagacttgcaaatttgagctctgtgagtctaaggaggtgcagggccttgccttgtgcctcatctttttgtgagcccctgggctaaggccacttctcctgaagtctccacgtgtcgtgctgcccaagtagccttggaataactggttcatggcagcccccttccagcccaggtcagagcctggcagactggacccagaagcagtgatttttgcataagaggcaggagggcatggtcacgatgagcccaaactttagcaccatacttcctggcttcaaatcccagccacgcttcttgctggctgtgtgacttagcttctccatgcctctatttcctcatctgtaaaatggaagcaataatgctactgactgcattgggctgtgccaaggatgaggggagttacagagcacctggcacctagtagctgggaagcagctgagaagcaggagcagtaagattcctgggcaccatttacctagtgccaactacacatcaggagctatacttggcattttccaaacgtttccttgtttggaaataatggctaacatttaatgaacgctgatggtgtgggagacaccacactgaggactttatcccagtgactcaatgaatcctccccctaaccttatgaggaagcaattattactgccaggcccattttacagaggaggaaactgaggtgcagagggctaagtcacatgccagagggtccaacatagaggacttgggtttctaatccagacaggtctggctgcagtgcccaccctcttgacactaccctggcccccagtcaccctaagtgggcattttcacctccattttgcagagatattccagagacctactcaaatgcaggccctgaaattttctcctaaaacatctttgcaggcgggagcaggctttcttcccctgcctttctcctggctgtggccggagctccccagcgagccaggtgttattcctggcagctttcctctttccccagaaaagtcccaaggaggcgcagacaaaggcaggaagcccggagcccaggcgcctgacccctgatgttggctcctccagccttgggccctcaatccaactcaggccgtggtcacattccagggtgactcagcctgcagccagcgggggcgaaggaggctctgttttggggactgtgggctctagccccacccacggacactctcacttttttttaggtactgccaggccctggcgggcagggcggtgggccctgacctttccatccccggctcctgcccacacagccggtttcctgcccaccctgggtcagatcccaaggcatcttttctgatttccgactggagccccatcacatgggttcctctaaaaacggcctattcctcactcactgacccctgtcgcctgccctggatctctctcccacttgaccctttgtgaaccagggaaaggagtcaaggatgggatgtcacccgcctccatgccccctgacgtatcgcatcttcactagatggaagagccatgaagggagggcgtgttgttcactccagcactcagaacagtggctggtctgaatgaatcatgtatgcagtcggtgctcaatgggcagcacctgcctcccagagttgctgagagggttaagaaagccaatgcaggttaagcacttgacacagagtccatcttctagattgtccagagcagaggctggcatggttcagctgtgcaatgttgggtagactgcccaacctctctgttcaatcatttcaactcaatgcagggccttaagctctgggaggatttaatggggaacaaaagggggcttagttgcacaggtgagctggagcaacccaaaattctgtttaacctgcttaacccattcttcccccagggctcacccacaggcctccagggttttcagtctgccattaacagggtttcccagatgctcttccatacctgccccgcactgctaccactgtgcataaaaagcacgtggccttgccctagtttttgttttctggtttttgaaatagacacaaattcacagaattatttctcaacacaggaaaaaacagcagaggaagtacagtggtaactagaatagctgcatgctggagaggcaatagggagtagtggggactgtggcaagatttagagagggtgctaccactgagtcccaggaaagtattgctagatcttcccatttttcagaagaagttggaaatctagatttttgtgtatggaatcccccaattttctccccatgtcccacacagcacaaacccagcccatccagggctgaatccagtcacggaccactgttgggtgacctctggtcagtgcatgttagaatgagacagatttatttgtgcctacaaattctgcatcctgcaagggcccagaccagccactgggccacagtgaccctcgcttgatgccactatgccttccggacccccagaaaaggagcctcccaaccaagagatctctctcagtgctccctgtggtggtcacacaagcccaaaggaagagatgcagtagcctggtgatatggctggggcttgagagaccacctccatgagccacctcgaagtacagataaactgaggcctgggaagcaggaagaatgcttctgatactcacaaggcaaatcaattagtttcaaggggcccacaagccatactcctaactctcagctcaccaccctcatgttcaccgaatggggctcgaaaattcttgctgtaattgcagaaatttgaatttgaactgggaactacatgacattaagaattatctttttatattctcaggcaagaaaatagaattgtagttgtcagttttatatgcattctgaaatattcaagggtggaatatcatgacatctaattttttttttttgagatggagtctcgctctgttgcccaggctggagtgcaatggcgcaagctccgctcactgcaagctccgcctcctgggttcacgccattctcctgcctcagcctcctgagtagctgggactacaggtgcctgccaccacgcctggctaattttctgtatttttagtagagacggggtttcatcgtgttagccaggatggtctcgatctcctgacctcttgatcggcccgcctcagcctcccaaagtgctggaattataggtgtgagccaccgtgcccagcctatgtctaatattttttaaataatgttaatgactgtcaaatcaaggtataggtacatggggcttcttaccgtattctttttctttttctgtatagttgaaatgtttcctaatttaaaagttttaaattaaattctaaaggtaaagacggagttgctcactcccagaagtagtggtgtcttactgggataagcatgaattttggaggggcctagatgtggagtataatttttgtatgaccttgggaaagtcacttcatctttttaaacctcagctgtatgataagggtgatggaaattacctcaaggcttggtcaggataaagaaatgagacaagggagctggagagccttgcttattttaacccaaactggatcaccattcagacggcatcagggtcacccacttgtttcacttgtttgcccttttttttttttttttttgagatggagtcgctctgtcgcccaggctggagtgcagtggcaggatctcagctcactgcaacctccatctcccggcttcatgccattctcctgcctcagtctcctgagtagctgagactacaggcgcctgccaccacgcccggctaattttttttgtattttttttttttttagtagcgatgaggtttcaccgtgttagccagaatggtctcgatctcctgacctcgtgatccgccctcccggccattgtccttctttaagaattttttgcttgtagttgcatttcttagtatctaaaagtcacatggttctaagacttttgagtgttcagattaccagtataatgtgtgggaagactgagaattcattcttcctgtgaattaaaaattcttgcaaagccaggcgtggtggttcacaccggtaattccagcactttgggaggctgcggtgggaggatcgcttgagctgagtttgagaccatcctggacaacatggcaagatgccatctctacaaaatttttaaaattaactgggcatggtggcacacacctgtagtcccacctactcaggaggctaagatgagaggatcacctgagcccaggagttcaaggctccagtaagctataattgtacactgcactccagcctgggccacagtgtgagatcctatcactaaaagtaaaagctaaaaattcttacagcccagagttttaatccagacagaccttgagcaagttgcttagcctttctgagcctgtttcctcctctgtaaaatggagataaccagagtgtccctagctgaactggaaggagaaagtgagattggggatctaaactggggtccccagggtccatgcacctaccctcaagctgccagtgaccctcattcccacacttctccccactacccactgttgacccttccaaggtgcccacaggtataaaaatcaaaggctcagcagggcgcggtgactcacgcctgtaatctcagcaccttgggaggccgaggcaggcagatcacctgaggtcaggagttcgagaccagcctggccaacatggagaaatcctgtctctactaaaaatacaaaaattagctgggcatggtggcacatgcctgtaatcccagctactggggaggctgaggcaggagaatcacttgaacccaggaggcagaggttgcggtgagccgagatcgtgccattgcactccagcctgggcaacaagagggaagatccatctcaaacaaacaaacaaacaaaaaaagagcccataacgtattcacatgatggaagactccagagaggatcaaaagaatggattcgatctccttgtagcaaaaagatctgcttgtagcaaaaagaacagatgtcaaaactaaaatctggagtgaaaagagcaagcaacataatgtctgaaaacatttctatacagtgtattgagaaagcctgacaggaaaaataattcatttcttccctgagacatttattcactgtctttttcttttcttgttttaaggcaaatgattgactacacagttgtaaatttcagctgaaaagatgtctggaggttgaagaaaaatacagtgagcttattgtttgaaaattcaactaccatattgtttaaaaatcaaaaagttcccaaggtttccggaattttcagacacgaatgtaaactaactctctcttacgtggctctgtattagctacaagctcatgtctatgtatgtaagagtaatttttatgtaagagtaatttttaaaacatctgggagactgaggaggtatgaaaactaaaggcaatgtggtaacttggggccggatcctggaacaaaagaggacagtaatgggaaactggataaaatcccgtgaagtttgaagtttagttaagagtaacggaccagtgttggtttttagtggcgacaaatgtcccataacaatgtaagatgttaacaatagggaaaacggggtgagagaaatacaggaactttttgtactatctttgcaactttctgtaaatcccaaactagtctcaaataaaaagtatatttttttaaatatggaaggttctacccagactcagcaacaggagaggcccagagagggagagaggactagacttcaggggctgggggagggttaaggggcttcggtcttacctataacaggataaatatttgtgttaagtcgaatgtattcagctattccttatgcaattcaagttaacttaaaaaatattttatgaaaaggagagctacagctatctccttgatttgaggctgtctttactttttctcctaaatcacagatgctcaatggagctggaaaacctttgggaccaggaggctgtgacatctgaccctggctccgttctgtccaggctgtgggacctcaggggaaggtagagacttcataggcctcagtttctccctggcaaatgaaattactaagcccaccgacccccgtcttccagacggggaatcccggggtgggtggttccagggcatgatcaagacatcccccaggggctctacactccgctggctcaacactcccatctgtgtaatgggttgaggagcgaggctatccctataggactgccgaaagcaaggcagggtttgacagcgcgtaggtgggtgccaggtgcaggcagaggctggagagtggagagcgcttcttccacccgggccacgcagaggctgtccccgcacggctccccacccacaaaccctcggtcctcacctgaaaccccctcctaggtccctgccgtcgcgctaagggccagactcggacttgtcgcggtgggcgattcgccccgggggacctaccggaccccgcaccttcccaccttgcaccttcttggcagggggagcacggcctggccccctcacccacgtgcggggccccgggactcccacctccgagggtctcgccttgcccgggatactggagcgggactcgggccgggccggccgcgggctccgagacccttgggctgcagcccgggcgggagccgccccctttgtctggcggggccgagcggagcaggacactcaccgcgtgcggcggcggctcagtagcagcagcagcaacagtgcggccaggaggccgaggagcgcggcccaagccatcgcggggctggcggggctggcggggctggcggggctggcggcctggcccactcccaggtaaagttccccgcccccacccggcgcgcccctcccactccgcccaccccagcccgctttggggcggggtggggggggtgggggatggggccctccgaggtccgcaggggtcggaccggggcgctctgttagaaaccctgctccccccagctcaggcctgatggaaaatgtgggagggaggggaggggagaaggagggggagggggagggggcggaagggatgtggtgggctggggagtgatcaaggggaaaggagatagatgggggactgagggggatgtggtggactggggggtgatggaagggaggggagagggagaggatttacaggaaggaagagattatatgcggggagggaagagggatggggaagatgggagaggacttttggggaagggaagaggagggaatgtgggaagacggcgggacgatggggaaacagccaaggaggtatggggaggagggggcacagtgggaggagaaaatgtggtgggaggggacgaacatggaggaggagtgtaagggggtcaggaggagctttcccaccacattccacattccacctagacagaggaaaccccccaaggctcctcctcaccccatcccccaccccaggcgtgctggggacctggagttttccattctgtggtctgggctgggagggctggtctggattatatcgcaccctatagtatcttcagtaactactgggcagggggtacaagggtgtctcagggagtcccctcatcctcacctgctttggggacagatagtgcccgtgaagtatgcaccctctacctggtgcacgttagggcctccggatgtggtggccattgtcatcgctacctggtgcttggggtgccagccccctgtgcccgcggctctgcaatgtaccaccccagggtgctgatgagaactgggggtcaatccagcctcactccacgcccctgcccccaccatccccattcccaccctgggaagcgttgggcaggtagctcaacctctctgagctcacctcattatctggaaacagggagggcagagttgtgcttacctctggggctgttgtgaggaagtgatgagagcttgacactaaaaggaatcacaaactgttgagtgcttggcacactaagttttatgaaaccatgggctgaacctggaggtaagacccaggaggtcttgttctagtcctgtatccacccattcagtgccgggtgagcttaggcacgtttcattccatagtcccagcagagctctggagaagctgttgctcctcctggtctcctggcttccatccttatcagccagggtcctgacaaggcccttcgagaaccagcatgatccgccccttctcacctttacctgcctgaccctatgcccccgactctctccctcacccactctgctccagccacactgatctccccatctttccctagaggtcccactgcagggcctttgcacgtgctgttccctctgttcggagcattcttcgcacagcctgctctttccaccacctccccggtgcctctatctctgctcagctgtcactgcagagaagctgtctttggccacctggtctaaaacagtcatctcctcttactgatttttgtttctttgtttttttgatagtttttttttctggcagtacttcacatgtcctgctatcatactcaagattcattcatttgcctgcttaatgttggctgtcgaggcagctggatgacccccttgtggcctcagcagattcagaacagcaggaggcaaaaggagttttctgatcctcttgtttatttttccagcttatctgccagagaagccaacaatcccaagaaggccatagaacgggtccagaggattttctccaaatttggggagctccaaagggctgtctgctagcagtggggttcacagctgggcttggccgatcctcagctttgtgaccccaagcagactgctccacctccctaagctgaggttcctcattgacagaatggggaaaagagaacctcatggagttgaggtcaggaacaaacgacctggtccatggggcacacctatgtgagtgcctgtcacaccatgagcatcagggaaagttaaccgcaattagcgcttataccagttccgctcctctccattatctgtgatcaggcttggtctcaattttcccatctgaaaaatgggaagaacagttccttcctcatggggctgctttgagaactgaattaaatgaaaagagaatgaaatcacccagcacagggtctggtatacaataggtactcaataaatattagttcttctactccccacccctggcttcagtgcagaccaatatcacctcaatacaaatatctcttccagatactctcttcccttctcgacccatagacaaaatcctcccagggaaggagaggcagctgctcacacaccaaagggagatgaatgtgagcctctggttcttcctggatttgttcaggagtcggcatatgtttaggaaggtggccaggcccccttcccagagaatgacccaccatgggtctgagctggtccaggaaatccacctttgctagtgatttgtcctgaggtgggcaccttccagatatctgttgcgggcttctagaaaaatgtgtttccttcctatttgccttctcttctgctttgggggcaatcgtgtgggaatgtgattagtgggggagctgaggggggctgtagtgttatgagggaaggccaagaaaactgcagagccccaaaccagagctgcggaatcaccatccctggaaccacctgcctatagatttctcatttaatgagctaaccacacgtctgtgctaggacaccatgagtcagatttttctaatacttgcagccaaagacattcccaactgagacgccttctagatatggctgaagggaggaccaaatgaggcaatgatgcatccggagcacctctgcaggactggcccatgcgagaattcaaaagtgttgctttgttttattatttttactttgcttactgtgtaagctttctatgtttatcaggctgacaggacatccaaccctctggctatggcatcttggaggaacaggcaggccttgaaaatagcagaaattccgaattcccctgccccgggaggactcaaaggaccctgctgaggacagagctgatatggcctcagaataaagatgagggaagaccatcccaaggaagacccctctagcccatggcaaaagggctggaatacgcaaggatttgaaaagcaagttttgctttccatataaacctaagcaagtcgcttaatctgtgagcctcaactactttacttgtgcaatgggcatgttgctggtagtggtgatagcagggagccaccgagagagcttccaagtgtgccatctaagccctcctctggggaagggaagctcctctggggaagggaaactggacccccgggaaaatttattctcccagggacgaacatccagacatttccctgtaggagcctcagtgtgttcagatgttcactgtccagtagaaacaagacatctaggcaactctcccatctcaccaagcctctgctctcttctgtggccactgtggggttgtgagagtaatgtcaagacccaacccaattagaacacagggaattttgcctgggaaagggagcccttctaccctacacccctgctttctctcttccaaggatcaggtctgattcatgtctgcatcctaaaggctacaaataaactgtgtccggaaaggaaaatattatgtgtattgccttcttcaaggctaaaaaccagtctcaacagagaggggcagttttaaatatttttttgtaacaatagttctaactttagttagtaactgaagccatctgaaacactttttcataataatttatttattccccacaaagaacctataaaatgggtagtaaaattattccgaattcacagatggtgaaatcaaggtccagaaagagtcacttcacccaaggtcacgtagtacttcctttgataagctagagcatgggaatttgatggcttcttaggacaagctaacttactccctggtgctgcaaacacaccctgggccttcccacctccacacctttgctcatgctgtttacctgcctggaagccctctctttctctaccttttgatttttccaaatcggttaggagcaggttctccaggagagccaagatgagatgagatatactaaaggcttattgagggagtgccagggagtaaaatgaagagggagccagagagggctgggagaaagggacagaaaggaggacaaatggaaggaagggacagaggaaagaagggaccgtgggctgcagtgcattcttagaaaggtcaagtctggccgggcacagtggctcatgtctgtaatcccagcactttgggaggctgaggtgggtggatcagttgaggtcagaagttcaagaccagcctgggcaacaaggtgaaaaccccgtctctattaaaaatacaaaaaattagccaggagtggtggctggcacctataatcccagctacttgggaggctgaggcaggagaattgcttgaacctaggaggcagagattagagtgagccgagaccgcaccactgcactccagcctgggtgacagagcgactctgtcaaaaagaaaaaagaaagaaagaaaaagaaagtaagtaagttagttcaaggctaacaggttgtccttgagcctcctgaggagccctatgtctcccaagaacaagtctgcttcccccagtgattggctaggagcaaaccctgggaagcatggcatatctgtcaatcaggctccaccaagggaggtcccagaggtgtgttttcatggctgctgcagctacgaaaggaagcacagctgccgtctaaaactggaacaatgcaagaataaattcttccacttacagaagctaaacgaggttgagaggtggaggggaaggagagacccaaaccgcaacgtttctggtgtttttgtgctgctaaagagagagtggtaaactcaagtcttcgagcaagtattgcaaatgaatgaagtgagccagtcatatcaggaaggcaacagggagggatgggaacaatggaaaactagagagggctgccccatccaaaaggaagcagcttctggcagtaccagccaactaaagccacgtagaaatacatgcctagtgtggccagatctttagactcaagagaagccagaaataatggctccaattattttaaaacgctgcatagaccaacagcacacacctgcccccagatttttagccctgcagtctagttgtgccaagggccagtggtttaaacatttggggtatgtaaaataggtttggagttgggatgttgaacaaaattgctctgtagaattaaggaaggacaacagagttttagggggcagcctgaaagagggggcaaagaccaggccgacatgagcacagattgggggcctgtcccagtgtgacatcctctgtggaattaggagccaataaatgaccatttctattggtgatgtgtcatactgagtgtttagttgtttgctgtcttgggctgtggaataacaccacacatacactcatatacatacacacgcacacacacacatgcactactctcacatacacactcacatgttgccccagttacccccaaacgttcagaaacaatctgctacacacgtcaagtgaccaacgcatcctggtttgcccagactttcccagttttagcactgagagccctgcatcctgggaaacctctcggtcctgggtaaaccaggaaggttggtcacgctatcaccacacctcagcgtagcgtgtgagtggccagagattgggtcagagctgtggcagccaccttggagcctgaggagaatctttgctaagtcacacaattaattagccacccctggaactgtgctgcagtagattagatcatagtctccaatttttacccactccctgtatcagaattagacattcacgcccttggctgcagggttgcggtgcctcccactatgagcagagaatagtatctccctgactcagtgatggtggactcgggcctgtgactcaatttgatcagtggaggatgaagaaatgaccagttgccagttctgagcagaggtttcacgaggaatcacatatttccacttgaccttggtttctgccttgagccatgacccacagggcaaacctgagctcaacctgcagcctgaagtagagaacccctagctgacctgcagaggtccgaagaagaaaaatgtacgtgttgttacaagtcatggagattttgagatcttcttaagcaacaagaattgactaatgtatactttatctctgaactttttagaatccttttggttgaatgttctttgtaccagttaaattagaataggctgctttctactcttggagccttggtacatctgtacaagaggatgatgacgacaaggcccccctcccatggtggttggacgaattcaagaagatcttgtgtctagtgcatgcagtaggcacttaataaaagagatgatgctaggccggctgcagtggctcacgcctgtaatcccaacactttgggaggctgaggcaggaggatcatgaggtcaggagttcgagaccagcctggttaacatggtgaaaccccgtctctactaaaaaatacaaaaattagctgggtgtagtaggggacacctgtaatcccagctactcaggaggctgaggccggaaaatcatgtgaaaccagaagggcgggggttgatcgcgccactgcacttcagcctgggcaaaagagtgaaactctgtctcaaaaaaaaaaaaaaaagaaaagaaagagagatgaagcaaggctgggctcagtggctcacgcctgtaatcccagcactttgggaggctgagatgggtggatcacttgaggtcaggagttcaagaccagcctggccaacgtggtgaaaccccgtctctactaaaaatacaaaaattagccaggaatgctggcgtgcgcctgtaattccagctactcaggaggctgaggtgggaggattgcttgaacccgggaggtagaggttgcagtgagccgagattgtgccactgcactccagcctgggcgacggagtgagaccctgtcttagcaacaacaacaacacagcagcagcagcaacagcaacaacaacaaaagagatgaagcataattctttcagcacatattaccaagtatttatttgccaacactgtgcaggcctctttatcaagaattttactgaagaaatgaaagacagaaaacctcttcacttggtcttttttatacatgaagagaaagcaggtctgaatcagaggcagagggttggaagaaatgacctgttttctgccatctgggccttgctgctgactgtctctaagaatttgcacaggcctgggcctttggagatttgaaggtctctaaagtgcaaggatgtcagctgcaggggagccatcctccagcatccttccccaggagagccaggattatgtagggaatgtgcttggctaagagcccagaggtggggcagctacccagatgcaaacatggctgggccaggcggcctttcgttcagcgttcccaggctaattccacctagaccttgtcttagcctgtgagaggatgttctggagtggtcttgcccctcttcccaggctatctgccagaggtggtgggtgctacaggagagggactccagcaagcttctcatcctttggttttcccaggacgggggacaggtggcctcacggctcccaaccagctgccttggcactttgtagtggaaaaaatgatgaagtcagacctcagtctcctcaactccctgctgtcctgcctgagagccagcctagcatggaaggcaaggagaaaagagacccatgttgatctgtcacccagacagaccctgagtgatgatgctcctgccaccctgaagcaccccaagaacctcagaacttctggcttctcatcttgaaaatgggacagcagtcatagctgctttgcttattatgtcaaggagttactaaagaggatccagttagatagtgggggtagaaaaatggctgcctaaggccacatttaccctctccttctagaaattataccagagcatcaagaataatggaaaaacaaatatacaaaaccaaaccacaaactccatttttagcaaagccaggagagacatataattcatcggcttcagagtacgtgtgaagcagctaagacagggcagaagccacatgggagtggtgagtgggctcagtgatagcaaatctcagaaagcatcagcaaaactacacttcctagggatgagggcttgccatgagatgaaagttatgttccttctttataaaaatgaatgtagaagcttgggtgaatacgattagcagcagaagctctcctggatctcgtttggttcagagaaacagaggaggtatagtgaagaattacagagagaagacatatttgcaggaagcagtctgtctctatggcagcagaggagagccacagttacagagcccatgaagctaccctaattcttccttacacccataggagcaatcagcaaaatacctgacccaggaaaaccaagcccttccaatgacaagcttttgaaaaagtgtaaaagccttgatacaaagatattatgataaattatgaagagcagaaaaatctaccaatagatgaaagtgttaacacaaaatggatgaaaattatatccaaatcatattggcataaattcaaaaaagaattgaatggaggctgggtgtggtggctcacgcctgtaatcccagcactttgggaggccgaggcaggtggatcacctgaggtcaggagttcaaggccagcctggtcaacatgatactctcgaggctgaggcaggagatcgcttgaatgtgggaggcagaggttgcagtgagctgagatcatgacattgcactccagcctgggcaactagtgaaactccgtctcaaatttaaagaaagaaagaaagaaacatcttaggagaactgaatggagcaactacctctgtgaaggaggacaataaggaaactgaagaactcaaaaagaaggcaggcaaaaggaggtaatgaacatgaagggttagcactcaggaaagaagtagaaagaaaaaaaaatatcagaaatgaagacaaaattggaggggaaggaaataggccctgcagaaaatacagcaaggacacggttaacagaaatggaaaaagaggaaaaaaatgagacagaaataaagaaaacattagaaagactagaaagaaaattggctgggtgctgtggctcatgcctgtaatcccagcactttgggaggccaaggcaggcagatcacttgaagtcaggagttcaagaccaccctggccaacatagcaaaaccccatctctattaaaagtacaaaaattagccgggcatggtggcacacacctgtaatcccagctactcgggaggctgaggcacgagaatcacttgaaccccagagacagaagttgcagtgacctgagattgagccactgcactctagcctgggcgacagagcaaaactctgtctcaaaaaataaataaataaataaaaataaataaaggtgtgagcatccatgcaccagataacacagcaacagatagttacagagcaaggacattttaagtcacttctctcagctcttgaaataccaagggaaaaaaaaaaggaaatagaaagtcaaaataacatagtgaaccacaaacactggctacctagtaagccacaaagaacatggcaataatttttttaaaagcagaataaaagtacaatagtctcagatcgcaatgcaacaagcctgtgtgacctccattcctctccctcccaccccagcacctccccagagggcaataatcccccagccccacttcaccaggcatcagctcctgtgtctgttccatgttagatcatgttagatctcatcttggccagacacggtggctcacgcctgtaatcccagcactttcagaggccgaggcaggtggatcacctgaggtcaggagttcaagaccagcctggcctacatggtgaaaccccatctctactaaaagtacaaaaattagctgagcattgtggcaggcacctgtaatcccagctacttgggaggctgaggcaggagaatcgcttgaactgggaggcggaggttgtgagctaagatcgcgccactgaactccagcctgggcaacagagtgagatgctgtctaaaaaaaaatctcatctcaaacacacaaacatttcactgctttaaaaaaaaaaaaatagaaatctttggtggatgttcagccacgctcatggttcacagctccaaactctgatgcacaggcaatcacatagcccaaatgtctacatgtcctgcatgtccgcagagggctagagtgagagagcctgggctccacggccagactatgtgaactcaaagcctggcacccgcccccccacttaaaaggcctcaggcatattgcttatctgtgcctttgtttccccaggtgtcaaatggagttggttgtgaggatgaaaagagttaatctctggaagtatggaaagccttggataaatgtgggctattagcattattttcacagcctcccaacctccctccactaataccagacacgctggagagagttctctgtctccctaaccatttatttggtgatcagaaggaccttctgcctgtgatttctgacctggcaggatactgggggaccacttttgcctctgcctggagatagcatgtctgagaatgaaaccgacttacagggcagcagaaccaagagatagggaaatacagtttcttgagatatcatttgaacccccggattcagccatgcctgaagccagaatgctcctgaccacatgaaccattaaattatttttgtttgcttgtttcagccaatttgggttgagtttctttcacttgcaatagaagaaagttctccattctgaagctgaataaggtagtatgtgaagtacttgtttcatacctggtgcttaatggatgaaaccttattacattctcatttcgtaaaccttctccagggctttctgggaggcaaccagatatgaattagagtgacacagctttgcactccttgcccagcctggataagatgccccattcgcagcaagctctatgcagtcagggccagcttcatggacatgcaacctgggtgctcacataggcccctgcacccagaatggtctcatgctcggcttagcgctctcctgtcaccagcttgaaattcttaattatttttgaacaagggtccccatgattttactttactctggtacccacaaagtatatagctggtcttaataccagtatcatctccactttccaggtgaggaaactgaagctcaaagaggggaagcaagcagcccaaggtcacacagcaagaaaggggtggagctgggaatcaaattctgattctgaggcccaagttcataactgcgatgtgccagtgcctggacaattcctcatatgtggatggcacttcacagtttatactctagtgcatagcatttgaccctcataccagctttagaagcagaaattgtcatgctggcatcaggcagagtacttgggtttgttcaagcctcagaaaccaaccctggctaatttaagaaaaagaaaaggtggggacgaggtattggaaggaaaagttgaccagctgggacttggaaaggacaggaacaagcagctccgggaacgcggggagcaggagccaggggtgtggggagcaggaaccagtggccaggtcttcggggctccagctgtttccaatctcagcattccttccgcttcagtttctgattctcccacgagaaagtctgattggccatgtttgggtcatgtgcctgcccacagaccttgatggtcaaccaaacaaggtgggaaggatgatcccccaaaggcgggtcagaaagtggggtgggagggctgaaagctgggcagggacggctgtgtgcgcattttacagatgaggaatgggaagcccagacagaaggcaaggccacagaaccgggaatggtggagtctgggctccagtcagaggcccaggctgcctctcttcactcccaggactccaggctggcaggggaacaggagggcattgttctccctgttggagtgaatggccgcctcctgggaaacccaggacccagatggggtctccccagggcgcaggaaactgcctcagactgagctgtattcaggggtcgaagcctcctccccaccctccccctacagtggacagactcccccttcaaatccaacctcactgctcagctctagccctatggtttttaagagaagctagtgggggaaaggcttatttttccaatgtgcattttttccggtatgtaagatactgtgtggaccaaataaaatatgtccagacctggaaacagcccaagcatagctagtttataagtcctggaatgctccttcctgcacacaaaaattaagggtctgtttacatagatatgctagtgtgttggagttgaacttttccttactctgaactcagatatgcaaagaaaaatgagccttttacattttccatggatgtcatctagttcagtgattaggagcaagagacatgctggagccagagaacctgggtttacatcttggctttgccactatgtgacctcaggcaggtcacttaacttctctgagtctcagtttcctttaagggacatatgtacacacgggtgtggcatttaataaaaaccacaaaagtccctgctactgctctgtgtccatggtatgatgttggtcatgagccctcacactggaagaaatacaaaatcttaagccaggctaatcatttaaactgtctatttaggcaagacaggcttcccctggggtatttcagggacaaactccattgatcagtttcccaccttcctctgctcctcttcaagaagcttctgcctgaacaccactttggtaacagggaaactgagctccgaggagagaggtcaaggttaggaaatgtcatttagtgagtgtcccttctgcacaaagccgtataggtacgcaagctccttgaatcctcataaccattctggatggaaagaatcaggactcccttaaccaacattgtggagcttgcaagtaacggaggcagcattagattccaggatgttcaacttcgaggcctgccttttctctgctcctattaactgtgtattcccattcctggtcataaggcaagattcagaggcatctgtgctccaattgaccatggcgcttgatcccaaaaggaaaaactctttctctctctctctacctgattaacaataataataacaataatttaatggctcaagcagggaaagtccagtggtgggaaatcctggcttcagggaactgggaagaaaaacagcttcaggaatggcaggatccaggggctccatggatgttgccaggactcacttctctctctaagcaatgctttcctttgtattggcttctccctcaggcagcctctccctgttttgtatcaagatagccttagcagtccttatgccctggcagcttggtgatgccagcagaaggagactctgggactaactctggttggccttattaaggtcagatgcaaatccctttacttctttctctagctcatatcggtcaggcctgcgtcgccttcccacttctagatctggaggtagagactagggtagttttctcacattgatgccctaattaatgaccttcctgcatccgagccctttgcagtgtgagtttatttccacatgatctgaatctgggcttggccttgagacttgctctgaccactggaatccaagggaagtgatgctgtgcctgcttccaacctaggcttcaagagtcttcttcacttctcccctctctgttggaactctggatagccaccatgagaacaaacctgggctagccagctgcaggaggagaaaccatcttaagaagtgcctggtcccccagcaaagactaacagcgcaacagccagctgacctatcagagtttgttttttaagcaatcttatctaccttcttgcaggactaggattgacagatgacaaaaaaaaaaaaaaaaaaagagttaaggcacatctgtaaagctagaaattggaaggctgctagggtttgaatcctggcatggccattccctagctattaggcttagtttcctgtggctgttataacaaattgccacaaactcgatggctcaaaacaacagaagtttattctcacacagttctggaggccagagggtgagcatcagtttcactcagctgaagtcaaggtgtcagcagggccatgctcccacagaggctctgggggacaaatcactccatacctcttccagctgctggtggctgccagcattcctttgcttgtagccacatcactgccatctctgccttggtcttcacgttgtcttcttttctgtgtgtctgtccaccctcccttggtcttcctcttacgaagcatatgacatgcatgcttttaatacatgtgataacatttagagcccagcaagataatcccagataatatcctcatcacaaaatccttaatttgatcatatttgcaaagactttaccatataaggtaacattcacaggctcctgggattaggagaacctgatttcttagaggtccaccattcagcccactgtactagcatgtggctccaagtgagtgtcaacctcactgtgcctcagtttccttatctgtaaaatgacagcagccacctcactgggtaattatgaagatttaataagtacttagaatggtgaccagcacatgataaaagctttgtaaatgttaaccttcaataatatcaagggtcggtcgggcgcggtggctcacacctgtaattctagcactttgggaggcagaggcgggaagatcgcttgagcccaggaatttgagaccagcctgggcaacatgacaaaacccagtctctacaaaaacaaaaacaaaaacaaaaaacctagccaggcgtggtggcatgtgcctgtagtcccagctacttgagggggctgaggcacaagaatctcttgaaccctggaggttgaggctgcagtgagctgagtttgcaccactgcattccagcctggggggcagagagagactctgtctctaaaaaaataataataataagatttgactgtgactgaaattcgcacaagaacaaatcccttctctgtcctgtttgctcgcgcctgtcttcatagcacccaccatggagacttgcacatagtaggtgctcagtaaatattaaatgcacacatgccactatgtagctgtgtggcttcaagcaagttgtttctcctctctggtcctcagtttccttctcccttcacgaagagcttcttgtagggaaagtccattcctctttctgggagggtgtgtccccatcaggggtagagggttcaggggtcaggagccggccacagctgctatctccctgagtcaccaaatttctcaacttgaggccaagtgtctaaatattgtgactgagccagttagagataagatgtggaaacattgatttggcccaagcaactgcagtcacggtgctggagccagacctccctggatcttctcagcagcatgagtgagtgtttagcacctgccaggaacacaggctgctgacctgcaaacagatggggaggcccagatgcctggcttggcagcaagagcctgcctttgccgtctctgtttacacagccagcatccagtcaaatctctgtggctccagtggagaaactaaggcccaaagggagtgaaggatgtgtcgtccagggttacgctgggagactgctatcccatgaagctaaaacccgcaagtcctaactcccagcccagcacctgtgggaacccaccaggcccagggagaaggaaggctggcagcgtgtcacaggcagggagcgtgcctgagcaaatgctcaggggtgaaagaccagatgcaagctcaaacactagagtgaatgggagaaaaggccacgtgtccaggactttggactcaattcagagaataaaagggaaccatcgatggttttaggaagaagagcagcaggatctgagaggctttttccaagtgcttatagaccaccagcatcagaatcgcctacgacaggagctgggggaggttgtcaaaatgtgggttcctggggtccaccctagatgtggctccccattgtagcaggccccctctgaggggattctgaagcacacccactgttttagtgagtaggagatgcagctaacatcccacttataaggtctaatctcagacaaacctggtttcaaatcccagctctgccacttacttgctctgtgattttaggtcacttacgacacctctctgagcctgttttctctcctccgtaatgaaacaatcttagcatttgcctcaaaggtttgttctaaggattcaataagataatgtaggtaaagtgctctacatagatccagagccctcctagtgctcaaaaacactggtttttagagattcccttgggcagcagtggggagaaagcaatggaggagggcaggcaaggaggcagggaagccagtgaggaggcagcagtgggactccggggagaggtctgtggctagggtgtggacatggtgacgggtggggtggctcctttgcaccgtgccaggtggtgccgatcttgtatgctcgattgcgaaagaagctctctggagttggtctagggcaggagagaagaggatgagcaaaaaaaccaaaagaggttgatcataaaacccatattcgcagtcacggactgggtgcttagcgtgggccaggccccgtgttagctgcttcctgatcttcatcctcacaaccacctgacagtgtgggtagcacttcatcaggggttgttaaccccgacactagtgacacttgtactggataattccttaattaaggggctgtgctgtgcactgtcaaatatttaacaacacccctggactctacccactagatgccattaacactcccaccttccagttatgacaaccaaaactgtctccagacattaccagaggtttcccgggaggcaaaatcacccctagttaagaaccagtgctttattctccttttacaaggagggaattgaaggctcagagagccaaagccctttgcccacagtctcccagctaagaagtggccggatttgaactcaggtctgactcggagccccggatgttaacctttgccgtgaaggaggccacatctatgcagtggcaggcccagatggtctatatgggggtcttggggacagtggtcttttccgaaggggcagctggaaacacctgctaagcagatgggctgcgtgagcgtttgttgggggtggttgtagaagcgatgatggggattatgagagagccaaatccccctccagaggctaccaccatttgccctggacagagggactgagggagatgggacgtggagggcaggcaagaaggaccaaggtggcactgttaggagaagctgggtgaggtcatctatgcctggagccccactgccgggagcctcccaaaaacactctccaagacctttgggctaaatatttatcctgtgaatgctcttttccttcctgcatggggagtggggctttggaggtgggtccaagaaatttggggagacagaatccagagaaagaggaaggggacaggccagaggtcagaggtcaggagaaagtagtcagaggccaggaataaacattcatcctggcatctaaagccttccagagtgagctccactgccaccacagccatctcactcagggaggcgtagaattcaaaatatgtttttgttttcttaagagacatggggaataaaattacaattttttttttggtccagtctttttttttttttcttttttgagacagagtctcactctgttgcctaagatggagtgcagtggcgcgatctcagctcactgcaacctccgcctcctgggttcaagcaattcttgtgcctcggtctcctcagtagctgggattacagccacccaccaccatgcctggctaatttttgtatttttagtagagacaagatttcatcatgttggccaggctggtctttaactcctgacctcgaatgatctgcccacctcggtctcccaaagtgctgggattacaggcatgaaccaccatgcccggctcagtcttgatatttttaagcaagggagttggaggtgaagggaaaattaagtcaaaaaatcttacccagaggacaggtgtggtagctcacacctataatcccagcactttgggaggccaaggcgggcagattgccagaggtcaggtgttcgagaccagcctggccgacatagtgaaaccccatcactactaaaaatataaaaattagccgggtgtggtggcgggtatctgtaatcccagctactcaggaggctgaggcaggagaattgcttgaacccgggaggtggaggctgcagtgagccgagattgagccactgtactccagcctgggtgacagagcgagactctgtttaaaaaaaaaaaaaggctgggcgcagtggctcatgcctgtaatcccagcactttgggagcctgaggagggcggatcaggagtttgagaccagcctggacaacatggtgaaaacttctctctactaaaaatacaaaactaggcggatgtagtggcgcacacctgtagtcccggctactcaggaggctgagacaggagaatcgcttgaacctgggaggcagaggctgcagtgagtcaagattgcaccactgcactccagcctgggcaacaagagcaaaactctgtttcaaaaaaaaaaaatcttatccagagaagaagtcatttttttagacacaagaatactttgtttatacagatggttgctataaaaggcctgactttgtgccgatagagaagatggatttatggtgaaggcagctcctgaatgagctcagtaatcaaagtcaaggtcctgccaggttaagctgcagcaggctccgctccctaccaaaaatgacaggctctgctccatctgatgggttctgctccagatgatggaactcataagggcatcatgctgtcaaacggttttactgccaagactgttgttcatgtgtccaaagcatcacgtctaacctctaggttacgatgaccccagagcttgcaaatcttggtggaagaattgcacggagcctgaagtatgtttttcatcggaaatggtgctcattaaagaaatacgtgcctgttagccatcacttggattgtacatgacatcgttgatgttgcgtgtgtgtgtgtgtgtgtgtgtgggtgcacgcacgcacttgtgtgtttacattttcttttccttctttgttcctccactaaagcagaaaaagtgttagaagatgtttaagagagatgtggaaacagagagaaatgcagttttatccactcttctctcttgtaagataaaaaatgtgtctctgggcagggcgcggtggctcacgcctgtaatcccagcactttgggaggctgaggtgggcgaatcatgaggtcaggagatcgagaccatcctggctaacacggtgaaattaaaccccatctctactaaaaatacaaaggattagccaggcgtggtggcgggcgcctgtagtcccagctactcgggaggctgaggcaggagaaaggctgaacccaggaggcagagcttgcagtgagccgagatccgcactctagcccgggcgacagagcaagactccatctcaaaaaaaaaaaaaaaaaaagtgtctctgggtgtttttaagccaaaagccattcttcaccaggagggcttgtgggaaagcagattctgactcagtaggtctggggtgaagcctgggatgctacttctccaatgcactcccaggcaacgcagcagccgccagtctgggagccatgcctgggagtggtggggccttagcacacagtgtgtgtccctgcctctggacacctcctgccatccctgctcttccctcccgctgctaagtctcgccctggtctccctgccttcttagagatggcgcttcctttagcaagtgtttgctccacttaaggattcagggaacatccgggctggagagatgctggagaccatcccgtccaactctcttcagttcccagttgcttttgtggcaagagctaaaaacccaactcaacccacacacgtttatatagacttgtggaaaatacaaagggctttttttttttggtgcgttttaaaatataaatggtatcatattgtgtgcgtcattctgtgcctgtttttctctcttagtaaccaatcttggaggttttttaggtcagcagagaaaaacctccccattaacagcagtacaacattccaggatctaaacaacagccttgacattactgacatttacggctggacaattctttgctaaggggctgtcctatgcattatagaatggttagcaacatcccaccggcatgattccagtagcacccctcgcccccatcagttgtgacaaccaaaatgtcatcagacattgctaaatgtgtcctgagaggcaaagctgccctggttgagaaccatggggataagatgtagaagagcaaattccaaagaggtaagatgagttacttcctggggcacaaggaaggactggaatggggatagagagttctcattctttatgacttcattcattcatccatttcatacatatttattaagcacctgccatgttccagacaccatgccaggtgctagggaggcagcagggaagaaaacaagccaataccttcctattgtggctctgccattctccctggggagacagacatgaaacaaacaaggaagacatcagtacggaagatgtgctaaaaactatgggagaaagtaggacaaggggagctgggagtgctggggcccaggtggggacttcagagcctcacatatgatgttttaatgtattaaaaggagaatatctccatgagttatttggatgatttaaaatttttttattacttgagcctaggagttcaagaccagcctgggcaacacagcaagacctttctctgcaaaaatttttttttaattagccagatgtggtggtgcacatctgtagttccaggtacatgggaggctgaggtgggaggatcacttgagcctgggaggtggaggctgcagtgagccatgatggtgccactgcactccagcctgggcgacagagagagaccttatctcaaaaaatattttttttttaagatggatgggctaagccagtcccagcctggctccctgaagcaaggagatctttcaaggggctgaacccgggtgcctgggcagcagctggcctcagccccccattccttccttcaaatccccttgcttaggacaataaactcctcaacaggtaccctcagctgcacttgcatggagctgcaccgccatcccaagagctcgtggtgggcctttgaggcaccctttctccatctgtgtgggttcctccagcccattgttaaaagatagtagtaatgtctaacatccctgtaaaaaaataatccccatgtttctcgaggccctaggtttctggtccctgctccctctctgactttttctcctcccactctcccccaactcactcagctccagccacactgactttctttctgctcctcaaacgttcaggctgggtcctgccactgggcctttgcacttgctgttcctaatgccaagtctttccccatggtctccccacagccagcttcttatcaaccaagtcccagctgacatgtcgcctccgcagagaggacatccccgaccaccccagccaaaggaggccttttctccaaatctccttacacgtctctctcacatgtgtgtttctgttacagtttgaatctgtgtccctgcccgaatctcctgttcaaccgtaatccccaatgttggagatggggcctggtgggaggtgattggatcatgagggcggtttctcatggtttcacaccatcccccttggagctgtcatcccaatagtgaattctcatgcgatctgcttgtttgaaagtgtgcggcacttcccctctctctttcttcctcctgcaccagccatgtgaagatgcctgtttccccttcaacttccgccatgagtaaaagctccccgaggcctcccaggaagcagatgccaccatgcttcctgtagagccagcagagctatgagccaattatacctcttctctttataaatgacccagcctcaggtatttctttatagcagtgtgagaacagactcatagtttccttcattgtacttgtgacttgatgaaatgattctgtttgattctttgccgggttgttgtcagctccataagaagaggactttatcttgttctctgtgtacaaacacatagtaggtgctctgtaagtacttgttgaacaaacatgtaaatgaatgaatgaatgagagccagtgtgatttggatgactgcgtgcatgtgctaagtaaactgttttccatgatctctggggttgtgtgtgtgtgtgtgtgtgtgtgtgtgtgttcagtttggtttttgccacatctttataccctctgttctattacaacttagcatttttctttttatataaagaaactcatttaaaggaatcttgacaatatcactagaaacagaaagccagtatcagcacatacttgctataaatagcaaaaaaaaaaaaaaaaaaaaaaaaagaaaagaaagaaagagagagagagaaagaaaggaaaaccctatgcatataaattccatgaagatgtgaaaaagttatcaaattctcacagggtatgattgctactgtagtttctaagcctgaggctttagaaaatcgatactctcttgaaaaaaaaaatttaagcctgaggctgttgtgtctttcttaaaaaggagattggcaggtgtcagagaggtgttcaagacaagttaactccaacccgaggctttctcaatgatctttctccaattcatcccaacacccacttgccgcagaccctgtggaaggccccagatccaaactcccttcctgctaacagcagctgtctggggagatttccttccagttgagccatccaaggactcctccccagcccttatctgtggaatggaaaaaatactagcccacacctcatagattaagagaatcaaatgagctcatttatagaaagcacatggaacaatgacaagcatgaaataatagtcactgatgtttactgagactaacagcatgtcacacccagtgcaaaatgcctcacgtcctcccacagagtcttcataacaacctttagctcatggaagtactatttttaccctatttggccaatgaaaaagcagaggcccaggaaggtgaagtaacttgtccaaggtcacacagcaaggaggcaatagagctgggatttgaaccccggctgcctgactccagagctgtacaaagccagataccacagaggctgggttattgttcgtccagacccatgttcccacaggtcctctcatcccttacctgctccctttctaccttgtatttctatcctcctgctctgaggagattcctctccctgaagatgcttgggcttgagggaaccaggaggagaggaggtgaagttggcctggatgactctgtggtcaggatcctaatgacccagtaattttcctccaagtccagtattctcaggattaagtcctaatcatccatctacccactcacccactcattcatccatctgtccatccatctatccatccatccattcatccactcacccatccattcatttacttattcatctattctcccattcacccatccatccacccacccacccacacatccacttatttacccacccatttcatccattcttccatccacccatctatccatctatctatccactcacctgtctatcaatccatccatccatttatccagccatccattcacccacccacccattcatctgtcctcaatccactcacccatccactcatttactcactcattcatctattctcccatccaccctttcatccactcacccaccatccatccatccatccatctacccatgcatccatccatccacccatccatccatccatccacccatctactcattgacccactcatttcacctattcttccatccacctatgtattcatccacccactcacccatctactcattcactcacccattcatctattctcccatctacccccattcatccaccagtccatccatccatccatgtaacatttactgaaggctcactacctgcctgcaaggttcaggtgagggacagagcaggactgtacaggtgtctctcagcctctaccctccctcattcctgcttccatcttcttctgatctgggataattcctctcctgggagatccaaggatgatggggagcaaaaggcggtggggtgaggggttggggcttcggcactgcctctctactgaggccccagtcccttctctgtatggacaaaatggaaacttgtggtttttcttcctgcattgaaccagcaggctgagctggggctgaactcctgggacattaaaagggggtgagaggtgaagatgcatccaggtggggggtgtgtgtgtgtgtgtgtgtgtgtgtgtgtgtgtgtgtgagagagagagagagagagagagagagagagagagaggaggtggagggcgaaaggcctgtgcatctctgtctctgtcaggcacacagagaatggcagtggtgagcctgcaatgtattgggaagacattattgtttgctcagaaatggccaagaaccccagctcctccctgccaggagacacaggattctgcgcctccaggcacaaccgtcttccctcccttccactttcctccctcctcctcaaacccttgcccaggtgccccccggctggctgggttcaccagaggatagatgaccacatactaatcccagcctcctgtggaggttagtcccaccctccaccgaggtggaaaattcctgcaggtagagtcagcagtggttcaagtcccaccgttgtccatgagatcggactacacagcacacacggccgcttttttttacctaccacgtgtcccacgtctcctacagtcctttaatccctgaccagtccttcagaggatggacacgctctgatctttgtagcctctctttctctcctcagggatcacacctcactgtagaccacagcccaatgtcccaggtgactcacttactagaatttgtaattcacttcatcctgccaccacgcccctgtgagctagacacccaaattgactccattttacagatttggagactgaggtgcagagagattaagtccctgtctgaggtcgcatggtggatgagcagcagacaccctggcgggcagcctggctcctgagccacgcgtcaccaccgtcttagtggaaaatcggccacaaggagggattccccttccagtctcctggcccttgccaaaggatccatactagacatgagaggaggaagggagtccacaccgagtctggcctcaaaccctcattccttaggaaactgcgctaatgtcgccccctccctccctgtgaccaccccaggttgtatctgcaccttcccagctagcccaggtgtcattacatatttatctgttgatcactcggctccagggactgccatatcggcccaggaagtcacgatcttgtctgtctggttaggggctgtggtctggcactgggcacatagtcagtattcaatgaattttggctaaagcccttttggatcgatcatctattgccagtgtggctcagatgcagcccccgccactgactgtgtgactctggcaggtcacaacccctctctgagcctcccttccatcatctgtaaaacagacttatctctgagtcctacacatgttaaacactcaaaggatttctgttgcatgaattagtgaaatccgagctggaagggcctctagagcccagggttgcaaactcatagactccaaaagccaggcaggagccagaaaccaccgagggagctgggtggggacggaggcagctgctactcagctctagtcacaagcactgccatatctggtttctcaagaaaaaccagaaatctagagatttacaagaagtttcccaatttctaagtattggcaactaatttaaaacatttaaacacatctgtggacgggatgtggctgcaggccgtttctttgcaactcatgattcatctaactgctcgtggcacagatgagatcaaagcccagagaaggtgagccaccagccccaggtcacagagcacaggaagtgaagaggaaacagtgacctttctccttcggctgcagccctgttgcccaagctcagggcaacccctgagccctgatcccaagggaggcagtgccgccttctcctctaggcctggcagttccagggtgacaggaaggtcacgatatctctgtttgggtgcactgcagcctccgcttcctgccaggaccaggctgtatcaggcactgggatgaagaaaacattccaagcaatgggctggcctagaaggtaagagctggtggcagagagggggtaagcacaccccttccttacttcagggacgtgcaaaccccttcagcaggcctgggcagagctgggaacagggcggatcaagccctgcttctggagaaacatgctctgccattggaggctgggagctctgtccccgcatggctcgtaggaccttggaatgcatttgtccagcagcttctaatacaccaggccctcatctgacccgcacccccacaacctccatgggctctcctccctctgtcccctcttgatctctctacgcaggcacaatggtgcctgctcagccctgaacacagcagccctgctcccacctcagggcctttgcacacgctattccctctgcctggttcacttcacccattatgcagatggcttactgtagacctctacttgaatgtcgccttctctgtgagaccctccctacctgttcactctgtttaaaaatgcaaacatcccccacagtccttagcctccatctggcttcctttgaccctgctgtgcttaggatggtgggacacatatgttacacgtgtttatttgtgtttccctttcctgttgctgctgtaacaaatcgccgtgaacttgggagctggaaataacatgaatgtgtgagcttacagttctggagggctgaagcccacagtgggtctcagcaggctaaaatcaaggtgtgggcaggaccacgttccttctagaggctcacagggagaatccgttcctccagcttctcaaggccacctgtattcctgggctcacggctccaacctccatcttcaaagccagcaacggcgaggccatctttcccatgctgcatccctccgcctgcaacacctctgcttccctcctgcactaagccccttgtgatgacactgggtcacgatgtcatcatctgggtaatccagggtcgtctcccccagctcaaggagactgctcagcagcctccattccccttggccgtgtaaccttgtacattcacgggttccagggatgaggacgtcttggggaagggcgcatgagtctgctgaccacacacaccaaacacaccaggcgttggctccaggaaggcacgtggtttgctgctttatgtatgtccaatgcctggtgcatagcaggtgctcagtagacccttggagactgcgtgggtgctggagtagaatgttgtggccgccaaagggaggcaggaaaggtgactcagctaccccagtggtcctccccgtcttactgatgaggagactcggggagagctgagatgctgagggctgaagagctgtgacttagcccctacccttccacacccatcctgtgcccacaaagaggggtgggccctgggctgtgtcggggagccccaaagagaaggcctgaagtccggcagctttaaaggggacagtcctggccatgagccctctctctgagcgcccctcacaacccctacaagctcccctcccaaggctaggccagcagtgcctgcagggggctgcccaggcgtggtcctgccatgtgggaactgcctgtgtggcccagcaggacccagatgagtcacaggaaagctggggtgccctccctccagccccacgtgtctccctggcttcaaaggaaaccgactgagggtccaagtttcctcatgactgaaaaatgttccaccccaaaaatgttccacatgagcaacagctcacccagaaagaaagagaaatgaagtaagtggcttttcagcatggggagagacacttggccatgcacagctacaggcagagatctgggaaacagaacgccggggaaagcaagtgaggaacaggagaactctgcaaatcagaacactcatcataaaataattctgcttgtttcacaaggacacatatacatccagggacatatatcatgggcctcggtatggaggctcaaggagaaaacaaaacaaaataatttattttgttttaaattattattattatttgagacggagtctcgctcttgttgcccaggctggagtgcaatggcctgatctcagctcactgcaacctcaacctcccgggttcaagcgattctcctgcctcagcctccccagtagctgggattacaggctcgcgccaccacgcctggctgatttttgtatttttagtagagatggagtttcaccatgttggccaggctggtcttgaactcccgacctcaggcgatccacccgcctcaacctcccaaagtgctgggattacaggcgtgagccactgcgcctggcctaaattattattatatgtttattttgttttaaattatttttatattttacaatggagcttcctgacatgtgacaatgatgctacggttttttgttgctgtttttttgtttgtttttgagatagagtctcactctgtcacccaggctggagtgcagtggcacaatctcggctcactgcagcctctacctcccacgttcaagagattctcctgcctcagactcccgagtagctgggagaacaggtgcccaccaccacgcctggctaattttttgtatttttagtagagacagggttttgccatgttggccaggctggtctcaaactcccgacctcaggtgatccgccacctcggcctcccaaagtgctgggattacaggcgtgagtcactgcgcctggccaatgacactatgcttcactgaacaagcaaaaggtactctgcttcactcttcatttaaaaatagaaactgaaaccatactgagacacctgcttccatctattagagtgacaaaaacatcagaaagttcacaatacatggtgctgatgaagttgtggggaaacaggcaccctcacacattgttggtgggagaataaattggtacaacctctacaaagtgcagtttggtcatatggatcaaaatgtaaaatgcacaaatctgttataaaatctgacttccagagatttctcccacagatacattcacacacacacacacacacacacacacacacacacacacacaccacactatgtacaaagacagtcaccacagtattgtttgtagttgttgttgttttgagacagggccttgctctgtcaggctggagtgcagtggcgcaatcacagctcacagcagccttaacctcctgggctcagtgaccctcccaccttagcctcctgagtagctggaaccacaggcacgcaccaccacaaccagcttgttatttcatttgtaaacatgaagtctctctatgttgctgtggctggtctcaagctcctgggctcaagcaatcctccagcctcagcctcccaaagtgctgggattataggcgtgagcttctgtgcctggtccacagtattgctttataacagaaaaggctggaaacaacctaaagggccatcagtaagaaaataactattaatgaatatggtccggccatgcagtggaatactatgcagctgtgaaaaaggacaacacaggtatgtgtgatgaattagaaagaatgataggtatgttaggttaaaaaaagcaagctgcaagacactgggtgtaacatgcatctatatatgtaaataaagagtgcatacaatcatgtgtgttttcgtacgtacagactttcagtggcagagcccgtgggaaactggaagcagcattgcttagggaaagtgaaacctgggggttaagggtggggagagacactcgttttcattggatacttttttctgtcattgaattttttcccatttaaatgtcttacctatgttttaaacataatttttaaaatataaaagcaatgctcacttgtcacaaaatctaagcaatgaaatgcaaatgatatgaaaccagttgtccctaaccactcccctgaaatcactactattaacatctttccagagttaacaaaaggtcttaagtttagatatgcttctttttttttttttttttttttttttgagacagagtctcactctgtcacccaggctggagtgcagtgaaacaatcttggctcactgcaacctctgcctcctgggttcaagcaattctctgcctcagcctcccgagtagctgggattacaggcgcccaccacaatgcccagctaatttttgtatttttagtagagacagggtttcaccatcttggccaggcaggtcttgaactcctgacctcgtgatccacccgccttggcctcccaaagtgctgggattacaggtgtaagccaccgcacccggcctagatatgcttctatattattcgaacttgtgcaacaggctgtgtgatttgaaattaaacacaagggccaggcacagtggctcatgcttggaatcccagcactttgggaggccaaggcaggtggatcgcttgagtctaggagttcaagaccagcccgggtgacatggcgaaaccccatctctaaaaataataaataaataaacaaatagatagatagataaataaaggaaattgaacacaaaacctcccttttgagtcaacgattatcaaggaggctgttatagttgcagaggtggcctggacagagtggtggccatagagacagagaagtggccagttgtaggagcaaatgtcacaggttcaactgacagggtcagacgcacaggcagggagaaacaggagggaggacatgccatgagctcccttgtctaggcccacactgaggtgacacggcccaagtgccccagcccgacagggtagactgcgatcagggtcaggaattcagtgaggcaggtcctggagcactgggagggggtacgagggtctcagatatctggggctgggactcttgaggtcatagcaagataagtggatgacatactcagtttcaagagttaaaccccagatttacatggctgcctggagtctggattcactggtgtgaaatttggagggagatgacgataataagaatactaatactaacagtaacaataactatcataagaacagaggccaacactctgtagcacttactacaggccaagtgctatatacgtgttaactcataatcccacaatcaccctctagatataggtgggtatagagaagcatgcccccatttcacagatgagaaaactgaggcccagagaggtgaagtaatttgcccacggtcacacagcttgtatgggatagagaagggcagggcgtatcactgaacaaaatggaggtcccttcaccccagagttgcaaacccagcctccctcactcccactacccctctgggcctcactgcatggatggacagtggcaacaacccctcctgggcctccctgactctaccctcgtcccccattccccacaacagtcccttctctatccagcggccagagcgatcttcctaaagttctagtctcatcttcccttggtctgctctcaggcagggccaggcattaggtgaggccagcaggtgccggcacaatgtcaggagacccccctcccaggtgagcccctgctctggcctgattcacagcgaggcctccttaggttttgaacactcagtgtccctcttgcacagatgggaacagacagtctctggaatccccccaaagccgcatttgaagtttctttccaggcagacaggccctttccaggcggatggctgcttcaatccagatgaggatggaggcctggggatctggcagctctgggctgatggcaccacgtccaggggagaggtttctgttttcctgcagtggttctctggcctatgcttgctggatgggggtgttggtaaatcctccagcttcctggggcctggggaggagcaaccctgaggtggactctgcacccactcccagaggccccagcaggacggagccccagctgcccaactgataacctgctcatctagacacccagcagtaccagctgccccctcccctctgctctcagagcttcctgcgatcagctccccgctaagttccctgcccttggactctctaagtgtctgcttctggaagaggcccaagccaagacctgggagacaggtcagtggctcagggctctgtggctcatgatatctgcagtattctctctgtggcctgggtcttcctgtcttctgggtgatccctcggcctttgggaggccgaggtggttggatcacctgaagtcaggagtttgagaccagccagcctgtccaacatggtgaaaccccgtctctactaaaaatacaaaattagccaggcatcatggggcacacctgtaatcccagctactcgggaggctgaggcaggagaatcgcttgaaccccggagggggaggttgcaatgagccaagatcacgccattacactccagcccgggcaacaagagtgaaactctgtctcaaaaaaaggaaaagaagagaaaagaaaagagagaagaaaagaaaagaaggcaaggaagttccatagcccatacagtgggtatcttaggcagggctctatcagatgaaaaatatagcagaaccctgactcaaattggctgatgtcatgagaatttacgtcaactgtctctggtaaaagcaggagtagagataggcttcaggcatggttggatccagatgctaaatcaatgtctacaaagatgcactacctctggctctcatctcttttactccacacagactctccaggtcatgatgtgaccaaggttgccccttgccactcccagctttattctcaccagctcagcaaccccagggaaaagggagcaccaatttccaattgtttcagaacaaggtcagtggcaatgttactcaaactcgaacgtgcccatgttcacactggggccctggggactatgataaaatgcagattctggctcataggtttggggtggggactcagatgctgcattcactgcattttttttaagatagagtcttgctctgttgcccaggctggagtacagtggcatgatcacagctcactgcaacctccactcctggcctcaagtaatcctcctgcctcagcctcccaagtaactgggacttcaggtgcatgccattatacccagttaatttttgtattttttgtagagacctggtcttactgtgtcacccaggctcgtcttgaactcctgaacccaagtgatccacccacctcggcctcccaaagtgctaagattacaggtgcgagccaccccgaccagcccagatgctgcatttctaacaagctcccaggtgctccttgtgctgctgatctggaaccatacgttgagtaggaaggtctttgcatgatgccattcctctcagctaaaagcacattgtaggccaggcatggtggttcacgcctataatcccagcactttgggaggccgaggcaggtggatcacctgaggtcaggagatcgagaccagcctggccaacatggcgaaactctgtctctactaaaaatacaaaaattagctgggcgtggtggcgggcgcctgtaattctagctactctggaggctgaggcagtagaatcacttgaacccgggaggcggaggttgcagtgggctgagattgcagcattgcactccagcctgggtgatgagagcaaacctccatctcaaaaaaaaaaaaaaaagcacattgtatacatatgcagaatattcatctaaagaaaaatcgtaatcaaaattaaaaagtaaaagcacattgtgcacacacaggaaactattgctgcatcccaagagtcccgcatgcagtagctcatcaactggtcacaaggacgttagaggtgggtgctctcattacctcatttctccacaaggcccagacacattcccaagcctgcacagctgggaagcagcgaagctgctttgaccccaagtaatgaattctccagatggaataaacaagggccctgctgatggcccttaatgctctttgcaatcctcctctattacaaaaccaccgtgctgagcaaccccacaggtgcgtgtgtttgtaagcatgcactagtaggtttggggaaagagattcctacaggcgaaattgctgtatcaaaagatgatgtatggttctattattgctaggggctgccaaaagggaaagagactgcccatttccccacatccatgccagaactgcatgttcttgtttttgccactctggggagaggcgcccttcctcatggccctaggaaggtagtgaagttatgtcccagccccaggtaggcagcctccttcctgcaaggggtcatccagggagcaccctgtgccagcccacctctgggcatcctgttgtcatggaaatatttcaaggcctgctttcatcctgaatagcaacttcagtggaaagagaaggcctctgttatgggctaaattgtggtccctcaaaattcatatgttgaagtcccaacccccaagacctgaaaatatgactgcatttagagatggggtctttaaagaggtggttacgtttaaatggttgttagggtgggccctaatccagtctgcccggtgtccttataagaagaacagacctcaggagcgcacatgcacagagggatgaccgtgtgcagaggcagcaagagggtcgccatctgcaggccaaagagagaggccttgacggaaatcaaccctgacagccggcatctcgagcttggacttccagcctccagcactgtgagataataactgtgttgcttaagccacccggtctgtggtcttttgctatggcagttctagcgaacaaatatagtctctttccctgcacacctagaagagttcctgggaagatgcccatatgcctggcttggttcacttcccgtctgttaccaattgctgtggccaccagatgctgaactctaatcggtcaggccttggccaagtgctcatccctggagctagggatgggctcagcctgccaacctgggttcacttttccttgtttgattaaaaattttaatttaaagcaagtgacggctggatgcaatggctcacttctataattccaaccttttgggaggccaaggtggaaggatcacttcagccccagagttcgagaccagcctgggcaacacagcgaaacctcaactctacaaaaaatatttaaaacttagccaggtgtggtggcacccacctgtggtcccagccacttgggaagctgaggtgggaagatcactcgagcctgggggatcaaagctgcagtgagctgtgattgcaccactgcactacagcctgggtaacagagcgagaccctgtctaaaaaaaaaaaagaagaaagtgaggtcgaacctgtggctaacaaggggataatttacatgtctgagctcaagttcagatgtacaagttggattctcttttcttttttggggggtggggacagagtctcactctgtcgcccaggctggagtgcagtggcgtgatctcggcttactgcaacctccgcctcccgggttcaagcgattctcctgcctcagcctcccgagtagctgggattataggcacccgccaccatgcccagctaatttttgtatttttggtagagatggggtttcaccatgttggccaggctggtcttgaactcctgacctcaagtggtccacccgcctcggcctcccaaagtgctggtattacagacgtgagccactgcacctggccatcaaaattagaagtctttttaaaagtccctttgatcccacccatggtaggcaaaccctacctcaggcatcgggtcaggctgcaatttccaactcatatctgcttttagcccctggagatttcacttaaatcctgtgagctcagccatctatccccaagatgcagttcctccaagatacctggcaggcaccctggcaggagggtgtcacggttctctaacctggctgactactgagcctctgggctccatgaggacaggatgtctctctcactcgctgctagcccagtccctggcacagccctggggcttggcaaatatttgttgaatgaataaacaggctgtggcttataagctggttcagattccagctccccactcactccgcatggaagaatcacttcaatcctccaagccccccgttcttcatctgcatgggggatattttgttgttattgttgttttttaaacttgggatttttttttttttgaaaaatagaacagatacagatacaaaaaccacacagcataagcatgtgacttaatgatttattataaggcaactgaacaccctcgtgaccacctctaggtcaagaaatgtaactttgcctgccacccctggaaacccctgcagaaccctgtcctctcaaagccctgcccctcccaaaagtcactgctaccctaagtgttatggatatcacttgtgtttctttcttgttttaccaaccatgtgagcagccccagacactatacttaatcttgcccactttttaaaaacttgatgtctcttttagtttctattcctcctccatccctttcttttccttacaatttacctgcgcagtacctgggccatttaacctgcagagatccctgggtctgggttaggctgatgacagcaccgtgtcatggttcaacacgttctgtccttgggattttctgtaaaacggcagctggatcctgaggctacaccagggatgtttccaagcttctgccctcacgggtcgtggtgagaattgaagggggatgggtgagtgtttgatatcagcgagcagcccccagaagcagccgccaaggctgttcggagatgctcacgaggcctgaacatggacagcccgagggacatcccatctcaacagtccatcctggcttctctccccacccagacccacccaccccactttgggaaagttctagggccatggctggctcatcccagcgagagctggcagcagaatggcctgtaattttagctgtttctcttccctaaaattatttcccatctggaaatggtttcccaaccctgcccaggaaagagttggtggtgcaaggaacatttttctattaaaaaaaaaaaataggggccgggcactgaggcaggagaatcgcttgaacccggcaggcggaggttgtggcgagccaagatcgtgccactgcactccagcctgggcaacagagcaaaactccgtctcaaataaatatataaaaccagccaccaaacactgaatctttgcagcccaggctctggaggcctggctgagtgccagctgtataccctgccttgagggaactctgtcagcgaggagcagagggtgagagggcatagtcagggctctgctgccaggatacccccacccacccagtacattcggacaaggactttgttgcagggcctgggacagccccaggcgagctgagaaggatccgacctggggttgagtggcctgcccagctgctgccacactcgaggtctgtgggttattctaggtcccacagggcatgaaatcacagagcagaagttcttcctatggggattctcttgcagctgctctgagcatttcaagaaaaaaaaaaaatccctgccgctaacatctccccatcacctcgctaattctcttctttctttcctttttttttttttttttttgagacggagtctcgctctgtggccaggctggagtgcaatggtgccatctcagctcactgtaacctctgactccctggttcaagcgattctcctgcctcagcctcctgagtagctgggattacaggtgcccgccaccacacccagctaatttttgtatttttagtagagacggggtttcaccatgttggccaggatggtcttgatctcctgacctcgtgatccgcccacctcggcctcccaaagtgctgggattacaggcttgagccgccgaactctcttctttctaacaaagttctcacaggcccctgactcctgactgtgcaagcaagagcatctggcaagaatatcatgatattttttagcacttcttgtacttattttcataattttttttttgagacagagtctcactctgtcaccctggcttgagtgcagtggcaccatctcagctcaacctgcaacctccgcctcctgggttcaagtgattctcctgcctcagcctccttagtagctgagattacaggtgtgcaccaccatgcctggctaatttttgtatttttagtagggacaaggtttcaccatattggccaggcagtcttgaacttctgacctcaggtgatctgcctgccttgacctcccaaagcgctgagattacaggcgtgagccgccatgtccagccttattttcttatttccttttttttttttttagacggaagctcactctgttgcccaggctggagtgcagtggcatgatctcggctcaccacaacctccgccttctgggttcaagcgattcttctgcctcagcctcccaagtagctgggactacaggcatgcgccaccatagctggctaatttttatatttttagtagagttggggtttcactatgttggccaggctggtctcgaactactgaccttgttatctgcccacctcagcctcccaaagtgctgggattacaggtgtgagccatcgtgcctggcacccagccttattttcataactgttttcatgataaatgatataggttttccatgtttgctaatgatataaagtttcctctgcagaaacaggtttaaagaaaaatgtgggcagaaagtccgtttaaaatatatattaaggaaaataaaacacagatagcacaaaatccaaagctacctggagttttggtgcctggagccatggtgaagagggcatactccagatctgagggcccaggcttgcattctggctgtgactctgtgggccctgtgattttaggcaagtcacttgccttctctgagtcatggtgctttacctgtaaaagaaaggaaaataataacacctccttcctatgatgatctctgagaattcaataaaacaatgctgagaagacactcagcccagtaccaggcacatgggttgcatttaattctgtcagaacacaaggtgggtgctatttttattcctgttgggaagctgaggcccagagaggtcatctagcccatccaaggttgcacagcttgtaggtggtggaggtggaactagaacccacaaagttctaatgtgagactgggatttgtgctcttaaaccactgtgctgctattggcagatccatctatccacccatccatctgtccgtccatccatccatccatccatccatccacccacccatccatccatccacccacccacccatacattcattcatttggtcagaattcatggaattgttctgagttcatggtgttttctcaaaaagcagcaaagtgcagaagttcccagagtaggttcaaatcccaacctgccatgtacaggacacctgggcaagttgtcccacctctccgagcctcagcttgcccatctggaagaggggaacattgatagccctttgaaattcccgcaggaggtagaagactgttttctgggacttcacagtgtcctacgtgccctgcatctgaccccatggtctgcgttcacctctaagtctcagtgaatcaagctccgccatatgtctgcctcatcctgcctccctcctccctttcactccaatttagccagactcagccattggggttccctgaacagcccctgggcctttgtacactttgttcctccagcccgaaatgtcctcttgcttccatctggtaaccatgattcctccctgaaaaatcaggtgggcttccccctctgccccaggagcatcccctgaggctgagccaagctctgcctttctgggctcccccagctccccgcttctctgacatggaaaggtcatggatgtaataacttagacaaactcttgtgctctgccactgtccaccttcttggtcacaaatgtctgcttcccttctttcatgcaggtacatgcacccctctgcaaacgagtccacacacatgtttttacacaatcatggcatgtgatccgaaggcatgagatctgccttcgtacatgcaacatgcaatggtggaacggcattacctctggctagtgacctctcctggactcagctatcacctctgcagaaagggggcagtaacaggacctgccgcacatctgctgtcatgaagaccacatgagctaatatatgtgggaagcccttagcacagcgcctgggagagcataagcgctcgatgcaaggcagaagaaaggcgtgtcctggtgtgacagggcccttccgaccagggctggtactaaggtgagaaaagcgaggtgcctaccgtgcaaaatgtaaggcagcgttcactctcagagcagtgcacctgccgctgggtcctcggagccacagagcagtcccgctcgccccctgctggtcactctgcagaatgacgtcccttccctctgctctcaggggtccctgagcctcggtttcttcacctgtaaggtggggtaggagaatctgcctctcagtttgcagggcaaacaggaggcactcctccaacatcagtgtcctcctctcaatgccagcacttaatgagcacctactatgtgcaaagaaagatgactgagacatgatccctacccttcaggggtttagcgagtggagaggggaggaggtaggctgggaacagtgactaaagtaagacacttgtccctatgcagcacctactgcttaccccagagcagtcagaaccactgccctggcatctgtccatctgcatatgtttactaagcacctactgtgtgcctgagcccaggctcagctgtggatttacatggattaaggggtttaatgctgtcagaacacaaggtgggtgttctttttattcctgttgggaagctgagggccagagaggtcatctagcccatccaagcttgcacagcttgtaggtggtggaggtggaaccagaacccccaaagttctaatgtgaggctgggatttgtgctcttaaaccgctatgctgctattggcagatccatccatccacccatccatccacctacccatccatctatccaaccatccatccatctatccatccatccccatccgtccatccacccacccatccattcattcaacaaatattcgttgagcacctactgagtgccagacacagtgctgagtgctggagagatgccagtgaccagaaagacacagcccatccctgcccccagcagctgttcacaaagagaggatgggcaataagcaagacaaataagtaaaatatatggcacttggtgattcttgctgtatataaaaatagagtaaaagctgtgcacggtggctcacacctgtaatcccagcactttgggaggctgaggcgggaggatcacctgatcccaggagtttggaaccagcctgggcaacatagcatagtacagaccctgtctctactaaaaacacaaaaaattagctgggcatggtggctcatgcctgtagtcccacctacttgggagactgaggtgggaggattgcctgagcctagtcgagatcgaggctgcagtgagccgtgattgtgtcactgaactccagtccaggtgacacagcgagaccctttctcaaaaaggctgggcgcggtggctcacgcctgtaatcccagcactttgggaggccgaggctggtgaatcacttgaggtcaggagtttgagaccagcctggccagcatggtgaaaccctgcctttactaaaaatacaaaaattagctgggcgtggtggcgtgcctctcaggtactcgggaggttgaggcacgagaatcgcttgaacctgggaggtggaggttgcagtgagccgagatcgcaccactgcactccagcctgggtgacagagcgagaccctgtcttaaaaaaaaaaaaaaaaaaaaaaaaaaggcagcacagaagactgagagggtggggctggagtgtgtttcaattttaaattaggccttgagggccattgagggaccttggctctcattgtgagtgagctgggagtcatggagggttctgagcaggggaggagcctggcctgacttaggcccttgcagaatcactccaccaggaggccagagtgttaggacccagggtggaggctgcgagctcggggaggaggtgaccgcacacaggatggcggctgggcttggcggggcagtggagtggggagacagagtctggatgtatcctgaaggtggaacagacaggattagctggtggatgggacatgtcggtggcagacagagaggagtcggggatgaatgactccctgagcctctggggagggtggagctggctgcccttaaggctaagaaggctgtgggcagagcaggtttctgcgggagatgaggagtgggttgcggatgcattcaccctgagttgcctggcagtgtggacgtggagtttgggtttaccctcgtgttgacaggtacacgctcgcggtgcggttatcacgctgctgctggtgtcaccacgcgggcgctgcagggacggacctttcccatcgccaggctcttcggggactgctgcaatgccccgtgcagccgccagggagcgcccgagccgcacccaggacgcgcggggaccgggtcatcccgcgggctacctgtgcggggcaggacgcttagccgcacccttggcctccgactactcggagtctgttgcattcctccttccccccgcgcgccgtgtgacagccaaaactgtccccagacattgccaggcgccccctggaggggaaagtcgcccccacggcagtcagagccatggcctgcgcagccacattcatttactgagcgcctactgtgtgcctgcgtctgggctccgcaggggctcacgggggtttctccttttcatccaggtttctgttcagatgtcaccacctcagaaagaccctgtcctagacacgctccattcaatgacccgaaaggatcttgttgaaatgttaacttattacatttttgggtttttgttgttgttgtttttggttttgctttgagacaaggtcttgctctgtcacccaagctggagtgcagtggcacaatctaggctcactgcagcctcaacctcctgggttcaagtgatccttccacctcagcctccaagtagctgggaccacaggtgtgcaccaccacacccggctatttttttttttttttttttttttagtagagacagggtctcactatgttgcccaggctagtctcaaacttctgggttcaagtgatcctcctgcctctgcctcccaaagtgctgggattatgccactctgcctagccttctttattgtctgtctcccctacccagcagacaaacccctgccctcttagagtgcaacttccagtgagccagatggtcacctctttgaagtggtggcatttgagttgtgccttgaaggatagaagctgccgatcatggcagaatttgaagaaaggtctttcctggcagagggaaaagtcagggcgaaggcctaggggctgctcaagtccctgccttaaggcatttagagcgtcctgcccagtgggtgatgggtccccaggccacacacagctgctggccgagcgccccaagtcatcaggaagccatgtggtgtggacaagggccaggcagcctggacacacaaaggcccattgacagctgcatgggaaaagtccagggcacccaagccggaagcccaaggctggtccctcttgtcaactcccaaggagctttgggtggggacaatagaaaagccagaccttctcaggagactcaagtttccctggggtggggcaaaaatgcaggtggcctggtcactgggacatgcagggcagctgtgtgaggcttttgcagtcccccagccctggttctaagtctagccctgccccctgctagcagagtgaccttggtcatgtcatgctccctctcagaccctaagttccctcatctctaacacagggtgaaagctgggtgcagtggctcacacctgtaatcccagcattttgggaggccaaagtgggtagatcgcttgagtccaggagtttgagaccagctgagcaacatggtgaaacctcgtctctacaaaaaatacaaaaattagctgggcatggtggcacacgcctgtagtcccagctactcgggaggctgaggtgggacaatcacttgagctagcaaggttgaggctgcagtgagcgaagatcacgcaactgcactccagcctgggcaacagagcaacactcagtctaaataaataaataaataaatacaatggggtgaaaaatagaagcaaccttccagcaatggtgtgagactgcctgggtagagtagtgggaaccaggcctgattcagcaggtgtttaagagcaggtggtcagttccagcagtcagctatagtggctggctggagtggccatctgtggcggtcagtagtggtggtcggtcatagtagtcaactttcatggtcggctatcacgacactaagcatgaggaccgtcaggtgagcatggctggggtgtttggtcagacagacctgggttccacaggtctcctgctttccagtgtggggcagatatgatctcctttttccaagcctctgttcctccatctgtaagatggggataatgagagccctacacagggcaatgactgtgaagcgcccagcactgggattatagaatgttccagggctttggagggcagcctcagaagagcaggccaaggaaagcgcaggcctcccgactgaaggaggtctgcagagccagcaggtaaagagtggctataaacgaacaggagctgggcctccctccgcgggcagtggggacgcatgagggcatgttcccagcctgatagcaggaagcatttctggaaaagcccagctgaatagtgaagatagcagagcaggaatgtgaagaacgcagacctgggatcagcttgctgggctcaagtcccctgtactagctgtgtgtccttgggcaagttacttgacctctctgtgccttggtttcctcatctgtgaaacagggataagatcaacctaactaggctatggggttgatgtgaggtcctgatgagagaatatttctacaaagaatgacagataggctgagggccttaaacgatgacgcaggccaggcatggtggtgtgtgcctatagtcccagctactaaggaggctgaggtaggaggatcgcttgagcctgtgaggttgaggctacagtgagccgagattgcaccactgcactccagcctgggtgacagagccagaccctgtctcaaaataaataaatgatgttggactgagaaagcatcaacactcacccaggctctggggggaaggtggatgtgagcaaggccaggaagagccaggaggaataggaggcaacccctgtatgtttgtgtgagcgcagccaggtgccagggtcgggggcggcaggagcagaaaccctgagaatgtaaaacaattcagcagcggccgggcacggtggctcacgcctgtaatcccagcactttgggaggccgagacgggcagatcacgagatcagaagatcgagaccatcctggctaacacggtgaaaccccgtgtctactaaaaatacaataaaaattagccaggcgtggtggcgggcgcctgtagtcccagctactcgggaggctgaggcaggagaatggtgtgaacctgggaggcagagcttgcagtgagccgagattgcgccactgtactccagcctgggtgactgagcgagattccatctcaaaacaaacaaacaaacaaacaaacaaacaaacaaaaaattcggcagcagtggcaatggcctcagggactctgagagctactaacacagccacctggacccacataggaaaagcaagcattctgagatcggaagtatgaactttggcctgggacaatagggagccactgaaggtttggtagtcaagggtcagcccctcttaccctgagagttgatataactaggatactccacagcttcatccccagcacctacctcggggcctgcaacatagtaggtgctcagggaaatgattttaaatgaagaaatgcattaatgggtgaatgagaaactggctactaaaagctggccttattttgcccttcacccacatagcactgggtacctccagggacttagatacagagggaccagcaaaggtaaatgtccggagtgggaacaagctcagggagacagaggagcagtgaggaggccagagaggctggagtagagaaaacaaagggagaacggggaggggaggccccgcggaggtgagccggctggacctctcaaggccttgcgagtagggaatagcgctttcttccaagtgcagtgggagcctccagagggtttggtggttgtgtgtgtgtgtgtgtgtgtgggggggggggggtttgtttgattggtttgttgttgttgttgttattgttgttgttgtcgtcattgtttttcagacgaggtgttgctctgtcacccaggctggagagcagtggtgcaatctcagctcactgcagcctcgacctcacaggctcaagcgatcctcctacctcagcctccagagtagctgggactacaggcacgcaccaccatgcctggctattttttttattttttgtggagacagggtctcgccatgttgccagggctggtctcaaactcctggactcaagcgatcctcccgccttggcctcccaaagtgcttggattacaggcatgagacaccatgcccagacagttgcattttaaatcctcctatcaaagagcataggcattattatccccatttcacggatgaggaaactgatgctcagagattgaatgatttacctaaggtcacacagctacgtagagacagtgccaggattcagcctcagcccattgggctgtgggatctgcagggctggaggggatagaacaatgccagctggagccagcactgctccccatctgctaagctctgccctacgacctctaggtgacactgggtgttggcaggcatgaaggacctacaccgtgggactgtggggaacacgaccaggccctgatcagtaggtctgctgagtcaccaggcctggcccagagctaacctccggcagccaggagccgccccagggtccgtccttggtgccctgcccagcagctgccaagcacagccactgccacatgagctggatgtcctgcagaagccagagtgacaaactacccccaaatctgccctcctccctgtgctgtgtggcctctggcaagtcccctgccctccctggcctgcggtgcacctgctgtctcgtgcaagccccaggccgcagtgcccctccctttgtgctgggtagaatcctggccaattgctgataccgagtttagaccggagggcagaaaggcgggacaggtaagtgcagacagtggggaaggctgtgggccccacaggactagactcttgtgggtgtggcggaggacaaggctgcccatcagagccccaggggcccaggctccacccaggtaacaggacacaagaagagagagcctcctaagcagaactcggtttctataagcaagacagatagatagggcaagccagctagcatttattgagcacttaatatgtgctaggcattctacagctattctcttacttaatcttctcaatagcgggtgatgatcatgatgcatggtgattcctgttttgcagatgaggaaactaagacctaaagaggtaaagtccttgctcaaggtccccaagccaggaagtggcagagccagggtgaaatccaagtccttgtcattccagagcctctgcctggacctggaagcccctcagactctaaagctctaatccccccccaacccccccagcaaagtgcagcattcaggactgagcctcaagggaccagccaggtctgattgtgaacctcagagcaaggcaggattgtcagtgcagtaacgtgagactggtggggcctgatggcctccttggggacagcctgggacaatcgcaaacagaagctggctctgtgctggagcttgccctgtcctggggacctctcccacccaggacgagctcacctcaacatgtaagtcacctgggacccgaggagcccattctagggatgtaaaacctgaggcccagaatgtccctctaacgtgcccaaggtcacacagagagtgagcacacaattggtactactggaacccagttgcctgtcttgtgcagcctcagtttcttttcctcccgggatctcctgtgttaaaaaaaaaaacatacaacgtggccgggcgcagtggctcatgcctgtaaccccagcacttagggaggccgaggtgggcagatcacctgaggtcaggagttcaagaccagcctggccaacacagcgaaaccctgtctctactaaaaatacaaaaattacctgggtgtggtggtgcctgcctatagtcccagctacttgggaggctgaggcaggagaatcacttgaacctgggaggcagaggttgcagtgagcccagatttcgtcattgcgctccagcctgggcaagagagtgagactccatctcaaacaaaacaaaacaaaaacaagaacaaaaaaacgcacagtgtactctcttgaccctcatcatcttccaacaagcaccctggtcctccgtcccacctaaggctgaacttctggtggaagctgtgcatactcccccacccactttcacaccccgccaccctcctcaccctgcaccctcctcacctcaccccctctcctcaccccaccctctccacaccccaccctctccacaccatcaccctctccacaccatcaccctctccacaccccaccctctccacaccatcaccctctccacaccatcaccctctccacaccccgccctctccacaccatcaccctctccacaccccaccctctccacaccatcaccctctccacaccccaccctctccacaccatcaccctctccacaccccaccctctccacaccccaccctctccacaccatcaccctctccacaccccaccctctccacaccatcaccctctccacaccccaccctctccacaccaccaccctctctacacggccaccctctcctcaccgccaccctctcctcggtgcccttgagcaggccttcatcccctgtgtcaccaaatggctcttggtgttgtgatccttgctgccaagtcccagtgtgggatcccgtgctcagagccacttctcagcaacgtttgacactattgacctccctctccttctcgaaacatccttcttgaaacagcctctattcctgacactagatgctccatgggccctgcctctcctcctcctccctggcagctccaactcagtggctttaaacaaacatgtgttctgatacatctcagactcccaacagcatccttgatctctctccagggctctggacttgaatgtcgagttacctacttgaaatatcctaaaaacacagcctggttccccacaaagacttatttcattcctccttccttatctccgcactctccagtctttgttcctcagtgacaccaccctgtagctcaagcatcaaagtgacgtatcattctcaagtcctctgtttccctcccaccacctccaaaatttgtcctgagttttccatttctctgtaaccccatggccaccaccctggtccaggctgctaccgtcctcacccttgacctccttgctgtttctttttggggtttttttttttttttttttttttttgctgctacatttgcttcccatgctgccgggggaactttcagaaacataaatcaaaacatgtcacttgcctgctggaaaccttccagtggcctctggctgcctttccaaagactcccaagtcctcacattggcctacaaggccccatcttcttctccagccttccctcctcccttcctattcagccacattggcttcctttcatgttctccagcaagccaagttctttcctgcctaggggcctttgcacttgctgtttcttctgtctgtaactctcttccttctgctcttcctataactgcctctttctcttcttttaaagcccagctcaaccatcacctttccagagatcacttccctgatcatctaattgaaggacctcacccttcaccctggtcactctcaaccctatcatcctgtttattcccttcataactcagcaatgtcgggagctcacttacttgttgacttgtttattgtctatccacctctcttccccagaatgttggtcccatgaaggcagggatttaatatctttcttattcagtgcattagatggaaaccaggtacacacagcacagtgcctggcacatagaaaatgctcaataaatattggatggatggatggatggatgagatggatgaatgaatggatgggatggatgggatggatggatgatagatggatgggatgaatggatggatgtgataaatggatggttgagatgaaccgatggatgaatggatgggtggatgggtaatgaatagctggaatgggtagttggatagatggatgatggatgggtggatgagatggatggatagatggatgatgagggatggatggatgagatggatggatagatgggatggatggatgggatgaatggatggatgaaatggagggatgaatgaatgagatggataggagggatgaatgaatgggatggataggatggatgaatagatggatgaataggtggatggatgaatgggtgggtgggggatggatggatagggtgaatggatggatggatgaatggatagttggatcgatggatggatggatggatgaatgagatggatgggatggatggatgaatgagtgggatggatgagatggatggatggatgaatggatgtgtgggtgggggatggatggttgggatggatgaatggatgagatgaatggatggatgagtggatgacatggatggatggatagatggatgggatggatggatggatggatgagtggatgggatggatgggtggatgaatggatggatggatggatggatgggatggatggatggaaggacggatgggtgggtaatggatagatgggatgggtggatggataaatggatggatggaatggatggatggatggatggatgagtggataggatagatggctggatggatggatggatgagtggataggatagatggctggatggatggatggatgggatggatggatggatggatggacggatgagtgggtaatggatagataggatggatggatggatgagaggatgggatggatgggatagatggatggatgggggatggatggatggatatgcaaccagataaacaaacctaaagtacacctttaatcatgccactctccttctccagaacctaacttggctgcccactgcctatggaatagacagcaaactctcctctgggacattcaaagcgttctgaactgattccaaagtgggggtgcagtgagtgataagtgagaagataagtcattcatactgaagcattaggaagtggatcagttaaccatctctctccttgatctgggcatgagccatttgagggcagggtcatcttcatctctctgtctagacattgagcccttggtcagcaacatcagagatgtctgatgaataaatacatgactgagtgagcgagtgagcaagtgaaagcagccccactctgccccaaaaagccagcaagcgaaaagcaggaagcttcagacccagagggctgaacagttcaaatttagaataggagagcagtttcactgtttcaggtcactgctcctggccaaggtttcaaaagtatgtaaagctggggctctgcagcaacaggaaaattgaaacttaccagaaactagactggcagtgtctctcgggagggactgatttgaatgccaatgacctgatcctccaattataagagcagcacagtgtcagactaaaaagcacactcccacgtaattgcaaccaaagccacaaagactcccacaactaagagtggcacttcttcagtgtcccgtcctgctgacacacttttggtttttgcagaccttgggcccttccattgtgactcttggtttgcaggtggaagaggagcagagctgtgaagaggagagcttggggtcacctcagctctgccagaggttctgtgacctgccagaggctctgggaccttccctgagtcatcatctgtggagaaaggacttgccactgagtggtgtgttctacttgtaccgctcttctgatcgatcagcgtctttgattgggttccctgggaaacagactcagagagctgggcacgcaggtggtttactggggagtgctctcacgcacagcacctgtgaagggggtagagtggtgtggggggcagtgatgtggggctggaatgcaggcacaccagaggcctcaccagagctcagaggctggaacagcccttctgagttgcctacatcaggaccatgaaatggggtccttagacccccatgtcaacccgacgttggaggtggcctgcccctatggaggaggcagtcttaggcaaggcgattctccttggctgaaggcgaatcctggagcctctgtcctgaaggagaatccaggtggcagactacaatctccactgaagtccactcctcttcacttccaccgcctggagccaacccatcacctctcatctggatgcagccttaagatcctccccagagctcagcattcatgcttggcccttcaccaacagagtccaatctgcaccaggaacccaaagccacaggaggtctcccagcacagaaatcagatcacttcacttcactgcttgaaaccctcaaatggcctcccagaacaaaacacactcagaataaaatcctgagtgatccctgcctctgcctatgacctctcccttcactgtgcttcagccctttctctctctctctcttttataacaatccatcatgacgttcaatgttctctttttcttgagacagcagctgtgttccaccgcagggcctttgctcttgttgttcccgctgcctgacgttctcttccctcagatcttcccatggctgactctacgtccttcaagtttcatctgacacgtcacctcctcagagggatattccctggttatccgatctaaagtggttccacattcctcgcacgttaccttccttttaaaccacttctcactgtctgaaactatcttatgactttactagttgacttcctgtctccttccatcagaataaactccgtgggggtaggaatcacatctgccttgttcaactctgttacctgcagcctctaaaccagaaaccaatgcgttgtaggtgttatctatttgttgaatggcttaataatgatttcatgattctgtctccttacttattgctaatcttgctctttttactgtttgccttaatcaatcagatttgtcaggatttatctgtcttcaggtgctttctttttaaagaacacctttttcactttatttatcacttctactttgttttttctatttcattaattgcatagtttacctttaatttcttattcctatccttttggcttcttatattttctattttcttaagttaaatacttaatccactttgttttcaatttttaaaaataatagacgtctttaaggctatacattttcctctgtaggcagcattagctatgtctcacacactttggtatgaacagtgtctgctttttaagactctagataagtttccatgttggttctgattttcctctgattcaggggccatttagaaataatagctatttttcaagaagttaaaattttgaggttgcttttgataatttattctgaattttattggattatgaaatgagaatgtggcttggaaacatctctactttgcaacttcactttgccatttacaaactctcactagaccagagtttccttgctgagcatgtttcctcatctgtaaagcgagcacaataaacagtggctacagatttatgccaggtgtggtggctcatgcctgtaatcccagcactttgggaggccaaggcaggtggatcacttgagatcaggatttcgagaccagcttggccaacgtggtgaaacctcatctctagtaaaaatgcaaaaattagccaggcatggtggtgcacacctgtaatcccagctactcaggaggctgaagcaggagactcacttgaacctgggaggcagaggttgcagtgaggtgagatagcaccattgtactccagcctgggcaacagagcgagactccgtctcaaaaaggaaaaaaaaaaaagagtttctatggccacctgggataggaggcttttcttgaagccactttaccctaataaacccattgtctttacttatgttgtatttatatctgcagcggccttgatgctgtcactgaccactgggacaccccaggcctgacaggcagctcctgacaccaactcaaatgctagttccgccgggtgcagtggctcacgcctgtaatcccagcactttgggaggccaaggcaggcagatcacctgcggtcaggagttcaaaaccccatctctactaaaagtacaaaaatcagccaggtgtggtggtgtgcacctttaatcccagctattcggaaggctgaggcaggagaatcacttgaatctgggaggcagaggtggcagtgagccaagattgcaccactgcactccagcctggatgacagagcaagacttcatctcaaaaaaaaaaaaaattattttgctgagagaaatctggactatacattccagctgtgaccaacttatgacactgcagctatatttttattagtcagtggatctaaaaccaaaaagtgtgaaaaaagaaaaatttctcaatgataggcaaacaaatcttaatatgtggtttattactttgtatttggttccactgattattctgtcaacaggaatgttagtggccttgccaccagcaaggttggcaatcttggctcccagttacttctcttgtaggtcggtcttaagaacaaggctttggccaggcgcagtggctcacgcctgtaatcccagcacttcgagaggtcgaggtgggtgaatcatgtggtcagaagttcgagaccagcctagccaacatggtgaaaccctgtctctactaaaaaaaaaatacaaaaattagccaggcatggtggtgcgcgcttgtaatcccagctactcaggaggctgaggcaggagaatcgcttgaacctggaaggtggaggttgcagtgagccgagatcgcgccattgcactccagtccgggtgacagagcgagactctgtctcaaaaaaaaaaaaaaaaaaaaaaaaagaaaaagaaaagaaagaaagaaaaaggcgttaaggctttaggattggatgtggtggctcatgcctgtaatctcagcactttgggagactgaggcaaggggctcacttgaggtcaggagttcaagaccagcctgggcaacatagggagacctcgtctctacaaataacttaaaaattagccaggtgtgatggcgcatgcctgtagtcccagctactcgggaggctgaagtaggaggatcacttgagaccaggaaattgagcctgcagtgagccgagatcgcgacactgtactccagcctgggcaacagagcaagagtttgtctcattaaaaacaaaacaaaacaaacaaacaaaaaaaaacagacaacaaaaatagcaagagtactttagatttatagacggtgctttgcagtgaagctgccatgatgaaagcttccattgaccgaccacctgtcgtgtgtgaagcattgttcttggtaactcacatatgttgctgcatttcctcttcacaataacttcatgtggaaagttttaccacctcccttctccaaatgagaaaacagtataagagaaatgtgactttaccaagagcacccagcttctgagtgggttcagcctgggggtgtctggctcttcctacatctggaatcttcagattgagaaggttcattgtcatttactcagcaaatatttgagcatctgccccttgccttctgtcctgcagtatgccgaattctggactaggtgctggagatggaacagggagcaaaacagcgtcctttgtcccctgtcccagttgggaagaaagacaaagaaaagacaaacaaaacaaaacaagacgaaaacagcacttcacagtatatatgatgttagagagggacggggcagctaagattctcaacagttcatttcagtactaaactgttttacttctattctgtttcttttcttttttctttttttctttttttgagatggagtctcactctgttgctcaggatggagtgcagtgtcgcgatctcagctcactgcaacctccacctctcgggttcaagcgattctcctgcctcagcctcctgagtagctggggttagaggtgcccgccaccacacctagctaatttttgtgtttttagtaaagacgggatttcaccatgttggccaggctggtctcgacctcccaacctcaggtgatcctctgcctcagtctcccaaagtgctgggattacgtgcatgaccctctgcacccagactctattctatttctgtcatcaggcggattgacagacacaaaaatgtagtgtctctattgccctagatctctttagccatgtccgaggaccaaggaatgtaaaatttatttgtttttgagacagggtgtcactctgttgcctaggctagagtgcagtggtggatcctcccacctcagcctcccgaatagttggaagtacaaacgtaacaccatcatgcccagctaattttatatatatatatttgtagagacagggccttgccatgttgcccaagttggtcttgaactcctggcttcaagcgatcctcccacctcggaatctcaaagtgctgggattacaggcgtgagccaccgtgccgcccagcccagggttctgttgtaatgagcgcgtccttcttgtggtgtgtcctttcttcacttgcagtcttcactcacagccctgccatttcttgttcctgtgtaatctgtcactttgtggcacttccttttcctctgtgttgacagagcctggcttgtttagccactcttgtgtcctcagggggtttgatttccttccatgttattgctattatgtgttacatagcgatgaactagccaggacacattgttatttttcccctggtttgcctccctgttcgtaatcctccgtcaccgttcacatttctattgattttcagccaaactcgggggttggcaaattacggccacccacctgtttttgtaaataaagttttattggaatgcagccaagcctgtttgtttacatattgtctggggctgcttgagctatgagggcagaattgagaagttgaatagctgagtgacagagactgcatacagcccctgtgacggtggaaaaaacaactgtttttcctctgctctcacactacagcaatcaacactaaagactttttttttgagacatagtctcactctatcacccaggctggagtgcagtggcacaatctcagctcactgcaacctccgcctccgggttcaagtgattctcccacctcagccgccagagtagctgggattacaggcacccaccaccacgcctggctaatttttgtattttcagtcaatatgggttttcaccatgttggccaggctggtctcgaactcctgatctcaggtgatctgcccacctcagcctcccaaagtgctgggattataggtgtgagccagtgcacctggccacagaacatctccatgaccaaatgtgtgtctgtttttccccaagcaccaagcagtggacaccagcggggcatcccccaattccactccgatgctgtctacctgaagatagcctcgggtcacacaggttgagggctcagtccccaagactgtcccctccttcccaccagtcacaagtccaggcttccagaacttctgaccgatcagctccaaacccgctctttgggtttaatttatttgctaaagcagctcacagaactcaggcaaacttacttttacgtctactggtttatgacaaaggttcttttaaaggacgcagttaaacagccagatgagacacacacagtgaggtctggaagggtcctgagcctgtccccatgccaccctcccagcacgtggatgagttcttgttcaccttcttacaaacctccgtgtgttcagctatctggaagctctctgagccctgtcctcttggcttttttttttttttttttttttgagacagggtcttgctctgtcacccaggctggagtgcagtggtgcgatctcggctcactgcaacctctgcctcaagggttcaagcgattctcctgcctcagcctcctgagtgagctgagattacaggcatgtgccaccacgtacagctaatgtttgtatttttagtagagaaggggtttccccatgttggtcaggctggtctcgaactcctgacctcaaatgatccacctgcttcagcctcccaaagtgctgtctctccatctgactgcaaggaaatgaagttgcagggaagtgaagtgacttccccaggccatggagttgttggctgtagaagtgcaaccagcagatcatctctcctgggccctgctcttcctagaattcacagtggaagatgtataccctactcccacctattccttacctccgagcctccctacacagcagagacctctctcctacatgactgccacccaccattgtcctagaaataagtcaaacagtggcatttgtcagtcccacatctagtcgtagcagggtgctgtgtggggcgggcgtggtggcagagaaaaggtgtgtcttggagcagtgagaaaagtactcagggctgtgcttcctcaaggagtctcatggcatgtagcctgcctggaaagttttctgccagcatctagcaggttgcatttcacaagcggcataaatcctccttaaccgtttgcccttacagctagtttgcatgtgatggtaaatctgaattgttactcagtgactgtatttattaagaacagcccacctgcaaggtactgtggcatcgagggtaccaggttaggaggaaactagcatttttttttttttagacagagtctcgctctcgttgcccaggctggagtgcaatggcactatctcagctcactgcaacctccacctcccgggttcaagtgattctcctgcctcagcctcccaagtagctgggattgcaggcgcctgccgccatgcctggctatttttttgtgtatttttagtagagacggggtttctccatgttggccaggctggtctcaaactcctgacctcaggtgatccgcccaaagtgctgggattacaggcgtgagccacagcgcctgacctcagcaaaagaatttggtaagtctagaggtaaagcttaatactgtaaagatgctaaagatgctgtcttcccagatcattaatttagtgcaatgtcagtcatgatcctagattttaaaaagcaattttttaaaatatagagacagggtctctttgttgcccaggctggtctcaaactcctggcttcaagtgatcctcctgccttggcctccaaagtactgggattacaggcatgagccaccatgcctggcccttaaatagatttttaaatataacttgacaaaataaatctcaccggattgagaaaatacataaacatagccaagaaaaacaatttttttgagtcagagtctcattctgtgtcacccaggctggagtgcaatggtgcaatcatggctcactgtagcctcactctcctgggctcaagtgatcctccagcctcagcctcgtcggtagctgggactacaggcacacaccactgcacctggctaattttttcttaaatttttgtagagacagggtttcactatgttgcccaggctggtcttgaactcctggcctcaagtgaccctcctgcctatgcctggctgaaaattttgatgagaatggggttgtgtaagtatgttcaccctgacaaaagagctgtttgctttggatttatggacttttctgtatgtatattacacttctataaatgtttacaaaatttggggtaggatatagaaagtagagataaacttgtcttataaaaacatactacagggctatcataattaaaactgtaaggcataataagacaaatagctcaatgaaatggaagaatcttgctacagaatttaatgtgtaagacatggggaaattattgattgttcaataaatactgttgagacaattagcaatccatttggaaaaaataaattatagaccgcccctcctgaccatatcatacacaaaatcccctttaattccaggggttaaagatataaatagcatgatcattcactgatggtagaaggattaattcatactgcctttttgtaggacaacttggtaggctccttcaacatttaaaatgtgcaggtggggcgtgatggctgacgcctgtaatcccaacactttgggaggacaaggcgggtggatcacttgatcccaggaatttgagaccagtgtgggtaacatagtaagaccctgtctctacaaaaaatacactaattagccaggtgtggtgtgtgtgcctgtggtctcagctactcaggaagctgagttgggaagatagcttgagcccgggaggttgaggctgcagtgacccatgatcgcaccactgcactccagcctggggtgacggagtgagaccttatatcataaacaaataaatatatgtatgtatttgtgtgtgcatgtgtgcatatatatgtgtgtgtgtgtgtgtgtgggtgtgggtgtgtatcccttgctccaacaatttcatttcttgactctctcaagttggcctacacatatatgtgcacatggattgatgtgcatctgtgttcactgtggtgcatataatgtgatagtggaaaactggaaactacctccatgtccattaggaggggaatggctaaattacatacatccacacaagagattaccatgtgtcacaattcaaataataagataggttcagtcattcatgcaacaaatatttattgagcaactactatgtgctaagaccagttcttagctctggggatagagcagaaaacaaaacagtctctgccttcatggggattatattttagtggggttgacagccaatgaacaaagaacaataaaaatatagtacgattcagagtgagaatattgtgaatcaataaaacagggtaaggggggacagggacagggaggtggcatttcagactgggtgctcatcaaatcttctccaaggaggtaacatctgggctttatttgagggagctcttcattcacggaaaagaggtctccagaaacattaagaaaaaacaaaacaaaacaaaagtaattacaggacaacttatggtttttaaactatgcctttgttttcctaagcatgcatataggtatacaggtatagatctggacatcagccaatggctggacatggtggctcacacctggaatcccagcactttgggaggccaaggcaaaaggacggctggagcccaggagttcgagaccaatctggacaacatggtgaaaccccatctctacaagaaatacaaaaattataaaaattagctgagcgtggtggtgtgggcttgtagtcccagctacttaggaggctgaggcgggaggatcacttgagcccaggaggttgaggctgtggtgagctacaatcgtgccactgtactccagcctgggtgacagagactccgtctcaaaaaaactaaaaaatgtagacatcagtcaaactgctaatattaaaggagtggtttaacacttattttccagcaagcacatattcacgttacttttagaatagacttttcaactctgtgaacaaaagctatttagagcacatatgcaaaagagttgggtcagcagaagcagcctaggggttaagagcgtcttccctggggcaaaaatgtccccagccggctcagctgctagctttgtgacctcaggcaagctgtggcttcagtttgtctagagtagctgttccatttgggtttgtacctagagggaggaggccaggggtgctgctgaacacccgacaatgagcaggacagctcccccatttgtcaagagcaatgtggagaagccgtgctccagaacaaggggcagtgcccgcctctcaagggttgaggactcacggtgtgcaatgcacttagcataggccctggcacatagcaagtactcaataaataggaactatttttattactggacttccctgaaaactaaaaaaaaaaaatgttgagagtatggaggacgtggtagtgccaggaatcagttctgctgaatcccaattccagcagctggctggaagggatctctgacctccacagcaacaacagtcttcacggggtgtgtgtctgccaatgggatggcctatacagagctcctcgttccttctgtttggtttttctggtttgaatctcatctcctgccagtagttcagggacattcccaccagatcacctggtctcttgtacgtattcagctgtgctctctcagacattccctgtggttcagaagaaacacactcaagcttctcttgtgggaaaaccaaaacccaaccccacctcacctcccacccccagcttcccgcgcttcctgtggccctgacctcctctttccaccccttcccaggaaatccaagagacacccactctgctgctatctcctccttccaccccatcaggtcagcaaaacggctcctgccacatttccaacacctggccactgccaactcactgcttctccctcttcctcttgtatcgcttctctgctgccttcagcacggctgaccactctccctcttggcctgcttgtcctcccacccctcctcctgctcactcatcctccttttctcaaccaggttctcagaggctgggccaaggctgctgccttctcttactccatgcttcctgttctcaatcccccagcaatctcacccgctgctgggtccttactaacctcctccacccaaagactccccagtctgcctgtagcccccaccctgctgtctctgccaggttgtctcaaaactccctgaactcagcagtcacaactgatctcgtatctatcccgccaatctggtctgactctagtgcccccatctcagggaatggccctgttacctgtgcaagtgggaagccagcagcttaggtggagtcctccatccccatcacccctggcaggtcctgggagcacgacctcagtatctcccagtctcccctcctccgtcgtccctgcacccatctcactcgcccctgcttctcttctgcttctgtaccatcgctcgttctccctgcaaccagagccatctctcaaagttgctatggaatccgaatcgcatcacgcagccctgcctgctgaaaactcttgaatccactgctctaaggatgaaatgcaaactcctccccctgtgcgcccccctgccccctctactccagccacgctggcttcctccctgccctgcagctgtgtgccacacgctccttgtctccccctagctcacttgcttccaccttccctacattcccaactggaatgcccaccctaccatgcactcgtcacctgcagcttccccttttggaccaggtattgaggatacaattttaatcataccccccagtggaccgtaagtttaatgagtccactgatcctgtcttattttctctattattatgtccccggcatctgacactattaatactgtgagtggcaaacattcaacacatagaagccatgatgacaatctctgagcagaatctggcatataaaccctacactgatcccagagaaccttctggaatcaaactccatcaaccctcaccacccccttcacccccaagtcccctcactcaagtgtcttatgcaactttcttggtaccacctgggtgattcttgaaagaaaacccaagcgtgggcatgcctgggcagcacagtggaggactgcttctgttacactgcgtagctttttactcagcccgttcacctgcagcacgggtcaggcagtatttaccccagcaagacccagagctcagctgagctgccttaagttgaactcctgtaggaaaggaaaggaaaaaggaaagacccccaaggacccaaactgtcctacacaaagagaaatgaccaccaaggtttggttcttgaatatgtattttttactgaaaaaatcattcataaattaacatacaaaaatgtacaaacacatgagtaaataatgtaatgacaaaggactatttttgtgaaaagtgttttttaaaacatctttagatttcagtgcaaaaatgtacccctggcacctcttaaaacgtaagagcaagctcaaaaacacgtagtgatggaaataagctagctacgctcaatgccatcgtcaatggtgagtggatacaatcaatccatgtggctcctgctcagctattaatgtctgtggtagaggatctctgacaagaggacctattatgtcaaaatgagtattcttgcaaatacccccccaccccccaaaacagcatgaacaaacggggacacctttccctgcacacagcaatcaaagacaagattaaggggccacccatcagtagccttgaagattttcagctaccaatatatgcacaaggtcacatttggttcctgtttttttttttaacatgacaatttcacactattaacagcacacgggcctggctgtacgtttttaactatgacatttcccatatgatattcgaggcctggtggacacatgactgacagtgcacatccagagattctacactcatcagacacagacatgaccgcaaaggtatcaaagtgaccccactttaagcagtgaaaaaagacctttccttttgttctcaaatcagcattttctaaagtcaggtgttagccttttgccaacagtgtgtacttgatggtaattatggcaacatagagcttcaaacaagatcgcctgacaacactgccgcatacacatacggcacccaggactcagaatcagtctgtcctggcaaatccttccaaatgacatcatagtgttgtcacattgaaagcaactcacagccttcagtgaggaaaggggagaggagaatgagaaggggagaaaagccaaggcagggacaaaggcccggtgggggatgggggttgcagggtggaggggggtctttattgctatatgcaccataaaacaaaggaaaaccaaatgaacttctgtgtgtaatgttcacttgtgaaggtattttaaagcatgaaatgcttaagtcttaaaaaacatatgctatagcttaccggcattttcaagggcaggaacctgctctctcatatgagccgataagagctttgcaatgcaatttattttctaaataccactctattcttcaaaagaacaaaaacacaaacaaacaaacaaacaaaacaaggcctggccaatcactcccacagtttgtggggatcatatgtccacagaaccatcacatgcaacgaaaaaagccctaacccacacacatacacacacacacccctacacacacccatgtaaactatgaaaatcaaggaagttgaaggcaaacaaggcaattaaaaaaaaatacgaagtactcttcagaaagtactcctcatcacaatatataaatatgttttatggaaaacaagggcgggggaggaaaactggcattttccagaattctgcagaagccgacagagactacaatttgagggctttggtttggggaaaaacaaagaggcacaaattcaaatacaatttagaacatgacttcaaggctgggcgcaatggctcacacccgcccataatcccagcactttgggaagtcaaggtgggcggattgcttgagtccaggagttcgagaccagcctgggcaacatggaagaaacccctgtctctactaaaaatacaaaaaattagccaggtgtggtggtgtgcacctgtagtcccagctactcgggaggctgaggtgggaaaatggcttgagcctaggagatggaggctgcagtgagctgtgatcgtgccaccacactccagcttaggcgacagagccagaccgtcttaaaaaacaaaacaaaaaataatatgacttcaaaatgcaggtgggggtgtgagcagtgcacctgggctcttgctgtctggagctttgttagtctaatttcaaagcttcaatccggtcttacctggatcccagctgccccacagcacacaagtgtcaccagctccctggctcctggctccctatttgagtgctccttggttctatgtatcagttactaatgttgacaaagaatctttccagaaaccaaaaagggacacagaggaatcactgaagccagctggtaatgtaggcacattgttcagaaactgtggccaagttccacaagagaaaaagtaagagggggagggattcccatacacacccccgccccccgccccccgccccgccatgctgatgaaaagacagaacacgaagcctggagagccagagatgtgtgtgcagcgagccccgaagggcctgctttaggcaggaagcagcctgctctaacagcagcctcccgcttagcggagagtgggatgagcacatgcgcggccgacagggaagagtgaatccagagcagaagtcaagggcaagactcgtgggggggggaagaaagggacagaagccagctcccagcaataaaggtcgggttattttgttcttttgtgacatgccctatatccactccctcgccaaagtgacagcaattcgggagatgacattcttcaactgcattttaactgagttcctgcacttgccaaccaagtaagtggcctaatacataaatcctcaatttgaattggagccagctagaaaattaaattttaaaaaggcattttacatggcttatttacaattatacttcttcaagaagtgattgttatatatttatgtctatttatctttcccaaacaccctcccctccaccctcaatccccacccaaagaaggtaattttttaaaaaaatgaaaccaaagagaacaccagagatctagaagaatggtgtggagtttcatttgctcttcctaaaacgcagctgccctgtggtgggtttgcctctgctctgaaggccaagaggctccaaggtcatgtgtagggacaggctccacggcaggaccacggcaggaccacggcagatcacagttcatcatgggttctggagactgcggctaagacaggatgtggggtaggagatggggagagagcagcgggacagacgtctgtcttgtgaaaacagaaagccagtgctgacgaaggaagtccccaagctcactccctcagttccagcggctgatccagtgaaggcgtttgtgcgtgtgctgtcacattttccccctgaactctgtgatccttcatgagacacagtatttctgttctcttgctgtgtagaccctcccccctccaaaaaaaaatctcatcggactgctttcttggtggcggtgggtaaagcaaacgtacattctctcctctcagtactcgttcacctgagccagctcgggtgtcaggttgacagttatgtttttatacaaggcgtcgtatgtgatgtttgcaaagtagttcaggttgttgaggccatccagcccttgccgttcttttgacttcctcagcagagcatacctgtttagggagggaacagagaagaggtggctctgagtgaggatccatgcctctgcagccagaggatggagcagggcgtcccacagcagaggacgcaacccatggcagcacttctgcagcacaaggtgggcgcacggccaattctgctatgccaggctgagtgctgtggtcagaaacacctcctgtgtttcatgccaggtgcttcacttaattatttcatttaatgctcacgccagcccctgctagcaaatgaggaagccaaggcttaataatgtgaggtaacttgcccaaggtcagagagtggggaagtgggaggtaaagcattaaaaatacaacagatgagaaagttcatactctgtattcagtgccattttactcccatgaaaacagaatttcagcaattagaattggttgtctagagcacagtcttccccacaatttagaaaagacacacacacacacacacacacacacacaaagaaagaaaaggtaacacagcaactgcagccacccagacagaagctcaggacaccattcggaacgggagcctgcggaaagggcgccactgctctgtcacctcagggaccttcatccaagctgtttcttcccaaattccccaaaggctactgtggagaccacaaggctgaagacataggacaagtgatttccttcgaagaatcttactattgaaaatgttcaccaacggtctgatccccacactgttctgcctcagagttagaatacatgcaacagctgtcaaacagctgtcagaacagggcctcggggtggggagtaggagaaggggctgtaatatgctctaagatatccggacatgaaagtataggggatacttctaagagacagagataaattccaccaaccttccaagaaactggacttctcctcgatggtgatgaggaatggacttgtactttcctgtgtcaccctctggccggctcacagaatagcctgcattctgtactctgtccaagaccaagagaacaggcttttagatacaacggtaatagcccaggagtgaccaaagcctacaagacatgttacaagcttaccctggaaatcacacacagcaaaagctctcacccgcttaactgactcattgtgtcatttcttaaaaactgagttaaaactcaattttaactgaattaaagtttttatgtgaacggaaaaaataggctgggctaggtggctcgtgcctgtaatcccagcactttgggaggccgaggtgggcagatcatttgaggtcaggagttcgagaccagcctggccaaaatggtgaaaccccatctctacttaaaaaaaaaaaaaaaaattagccaggcgtggtggtgcaggtctgtaatcccagctactcaggaggctgagacaggagaatcacttgaacccgggaggcaaaggttgcagtgagcaaaattgcaccagcttgggtaacagaaagaaaatctgtctcaaaaaagaaaagaaaagtacggaaagaaatggttacttccagggaataaaatagaatcaaaatggggattaatacttagacacttgtatcatctaattttttttttttaagagacagggtccactgtgttgcccaggctggagtacagtgaggtgatcatggttcagtgcagcctcaatctcccaggctcaattagtcctcccatctcagcctcctgagtagctgggactacaggcgtgtgccaccacaacaggctaattttttttattttttgtagagacaaggtctcactgttgcccagactggtcttgaactcctgggctcaagtgatcctcaagcctaggccttgtgaagaggtgggattacaggtgtgagccacagtgctcagcctatcatttgaatttttattagcaaaatagtccttgtaattaacaacaaacacatacttttcaaaagccaagctacaaaggaaacagataccaggtagtattttgcatttgttccttatgaggttactgtttacttactccataaaaatattactttattccactcacacacaggattgttcacccaagcttgtacagtacaagccttatgtgatggcgcagctaaatctatgtagacatatcactaatattccacccttcagtttggagtggttccaatgaaatgggcatttagtacagagaacactggtgaagtgaaaagttttgttagaacctttagcaggaggggcacttagttataatatgccttaaaaaccctatttgcatccattaaaggacagagcttaaaaaaaaaaagagccttaaaatgactacattcgcttataggaatttttcctaaataggaataacaggcaaaagaattatctactatatcacactctaaatagtggaaaatggaaaagattctaaatatacaccaggaaatagttacataaattacagtacatctatataaccgaattaaatggagccacttaagatcctgtttacagagtatttaatgttgatataaaaacagtaacacctattgagagcttatcacatatcagatatgccagagctctatacacattacatcatttaatcctcacaatcctgagatttgtgattttaaaaactgacacacagagattttaaattactgttcacttgccactttttaaacacaaaataaactcaatgaaatggtaacatgttacttattgttgtgggtaatttatttttatactcatttgtattttataatgaacgtattatttattagaagaaaaaattgctaaattataatttgttgattttcgcatgtcaaaggagaaaaatgaaaatagctgctttgttgggatatacagtttgttttttaagatattaagatatttttaaattaagattaaagatattttctaaaaacttggatgtgtgtggtgtgtgtgtgtgtgtgtgtgtattttttaagacaggtctcactctgtcacccaagctagagtgcagtggcacagctctctgtggcctcgaactcccgggctcaagtgatcctcccacctcggccttccaaagtgctgggattacaggtgtgagccatcacagctggtcaatttcatttttttccttaaccttttaaactgtagctactagaacatgttaaattacacacatggcttgcattatattcctatcggatagtattggtctgcagtctaaggtagcatttctagaagacaccgaaagaacggcagaggtacctgttccagaggtcgtcatcttctccaccccaaccccagaaagcattaggaaagccattgattttccgaaattgttccactgttaagccactcactccgccaaagaactcggtataaggaagcctaggaggagatgtgggacatcaatcatctgtgtgttacagggtaactgttttccctagaaggttctcatttgaggactaaaaacagtgctctctgtgctcctgacctgaaccatatgaatgtatcaaattagcaaaattaatttttgcaaactgatttttaatagctttagtgagatataattgacatacccatacacaattggcccatttagagtatatcattcaatggttttagtttattcactgaattgtgcaaccatgaccacaatctatattaacatgtttcatcactgtcccccgcaaagccttgcacccattagcaatcaccccctgctcctcctatcctccttagccccttataaccatttatctactttctgtcactatagatttgcttattctggacatttcagacacctggaatcatatgatacacaacctttgtgtctggcttctttaacgtaatgttttcgaagttcatccgtgttttggcacgtatcagtatttcattgctttctcctgccaaacagtgctccaattgtatggatacacacattttgtttatccatccatcagttgatgggcatctaggttgcagctaattagatttccttttcacatcgctcaccatcctttcagatttaacctctttaattaagaagaaatgatactcacagatacatatacttatccaatttggttgcaaaatgcctcggcatctgtccacatccataatagttgcgatcactttccggtatgtgatctacatcatgaaaaatcaaacagtcccaatccaagtctttcattgcctcttgaaagccaacgttgaaaagcatggctcgattaaagggttgggtaccaacctaaaagaaacagaactttatctttaaaagaatcttgaaggaaaatctttgctgtctttcctgtgcctaaagacgagtttattagaaccaactggaaaagatcactgggctagtgtaaccaggtccaacaccacaaatcaactcacagtgtggctcagaagtcactggacctctggcatgggcacagtggctcacgcctgtaatcccagcactttggaaaaccaaggtgggcggatcaggagttcgagaccagcctggccaacatggtgaaaccccatccctactgaaaatacaaaaacattagctaggcgtagtggcgcatgcctgtaatcccagctacttgggaggctgaggtaggagaatagcttgaacccgggaggcggaggctgcagtgagccaagatcgcaccattgtactccagtttgggcgacagagcaagactccatctccaaaaaaaagaaaaagaaaaagtcactggacctctggccccaatttctttaaaaatgtaagtgatagcaaacgcaagcttctctctcccaaggctactgaaggcagaaatgcaaccgtgtaccagcatttagaagagtaccccgctccacaaagggaagagacaacactaccatttctactccttaccacttgctcttcagcacatcaaccaatctctaactgttcataaaccaaatctagtacaaagagtggtttttagttttgtcttgttttatttttaagatctaactaagacaacagtcactgagcatgccagggactcaagcctatggacaaagaattcagtggctcatgaagaaaccagttcaaatcagttaacagcctaattagtgttacagctacattgactcccccttgccactatcaaaatacccaacttaggaccggcagatagaccgttagcatttcccagatgcccagccttgctgaacagtggtgctcagcttttttctcactccagtataaggcaagctccagggtgaccacttaacagcaactcagactgtgagactcaaaagtgtgcccatagagagaggtgagcatgcaaaagaccctcagactgacgatcagtgtattcagggaaatctgtcaaccttttgtttatctatggatatagcacctctagttcaaggatcacatacttcaaaatgcctacagaagccaagtcagtaatgtaaacatataaagtaggcccggcaagagaaaaccacagtaggacagtcatgttccatctaaaggcaaataaaatatatgcaggaccaaaaaaaaaaagatttacagactgaatttgccatgcggtcttcttcagtttgtgacctctatatctggttccctaccaatatttttaagattaaaacaaaaccaaaccctcaggcttagagaagtttgcaaatgtcccaggccacttggttgattaacagcagacatgacaagcactgaggtctcttgactccaaggccacatcctctgtgctgtaccttgctgcagctctttatcttaaggggaacttcctgggtctggagcctgcaggcaccaacaaaaccataatacaagaggcctttgttcatgagccaacaaagctctctcctggattcaagtgtgcccagtactgggcaacagacatctcaaaccaggagcacagaattgctctctgctcccccttcaaacctcaggcaactcgatcctaagatttcagttttattggctcttcacaccaacagtggattagcttgcagcaacctaaactgctgtctcagaagagaaaaaagaaaggaaaagaaaggactactcacttgttcaaccacataaaatgcaaactgcaagcgctggcgctggagcatgggaagcaggtgtctgaacaggactgggaggtgctcgtggcggttccggaaggggataaggatcgccacctggagtggattacagcaaaagaagcacagttaggactctcagctttcactccttagcaggacacccctgatgaattgctgaccaacccatgggagttctgggaggctggctatcttgtcctcagctttctctaaacaaagatctatgttggcaagttggcccttggacctagatgaatgtgattcttacatataccatatcttatagtacatagtaggcctataatttattctaggccataactcataggaaaacacacattctacactgtgacaaaaatacatctataaacttacaattaaaacaagcttcacaaaacagtatttccccttacaatgtgcaatgtacaaatgctggttattcaactgtttttatttcccagcgatgggctggatactgatgtgttccagatctgctgcatcagcagcacttaacgaggctggcacagaatacgcattttaatagatacttgttgaaagaatggacttcagctggggtcacagcttaacgaaaactactgatgtcttctgactatggtcaggcagaaaaaaactaaatctcaatgtcaagccaggtaactttgctttttaatccactaatcttgtagtaaccaatggagaacaggaatgaagcactgactctgtagatgacttctgcaaatgggtcattagagaccaccaacgccctcatccccttgctttgttaatattcctggtgggaagaccaaagggtcttgctcggtcatcagaataatgcaaatttctgtatctacaaaaagagtccttgtggaaacccattcctctaaaatgtttctacatttgcatggaatggtaggatgaaaatgacaaaatgtcatggttagctaatcccatggtgattcggaccaaaggcaaaccccaggtgggcttctcagcattttggctgtgacttcacaccctaccttccaccgaggcatgcaatcagaaggcttccagtgacctccgagcttgatggttgggtctttggagaagagttcatgaatgtaatccattccaatttcactcatgtttatgtctattgggccctctgaacagagacggggaaaagggattaagaggtcagaaaatgataggtttccctatgcctggggttttagtctctggagagcgcaatgctttttcagctgaatttgtttttagcaaggatggaagtcccttcctctgctttccatctcaccgtatttcagttcctcactattttcaaggtgaagaggcaaatcaaggaattaagactttagagttctgcttctgtcaggggccaggtagaaatgaaaactttaagtaaaacagtagctgagcttttttttttttttttttttttttttgagacagtctcgctctgttgcccgggctggagtgcagtggtgtgatctcagctcactgcaacctctgcctctgggttcaagcaattctcctgcctcagcctcctgagtagctgcggttacaggcatatgccaccacacccagctaattttgtatttttagtagagatgaggtttcaccttgttggccaggctggtctcgaactcctgacctcaagggatccacccacctgggccacccaaaatgttaggattacagtcgtgggccactgtgcccagccttcttttttttttgttttgtttattaatatgttttaataaatagagacagggtctcactatgttgcccaggttggtcttgaactcctgagctccagtgattctcccaccttggcctcccaaagtgctgggattatagctatgagcccctgcacctggctgcagctgagcttttctgagaagaaggagaaaagcagctgagcttagagtcatgtcaggtttgctcctgatgcaagtgcagccacactacctctctcaatccattcaccagtgggtcaggaccctgagtgattatgtcctaactcagaatgctggtcatctctgacttaagtcaggaagtggtacagtaacaatcaataaatgctactgaaacaatgaactaataacattagttttaggcctgtcaacgcctatttctgatacacaaatctcagccttcccaaactaagcttacatctagatgcagacaaatgcaggttttaaagggaaaacctatatatgtgtggtgagacatgcaaatgaaacagtaaggcttccaacacaacttacatacttataattaattattcatatatggatgagaatatgttcaaataccatgcacgactatttctaacattttccctattttcactatatttgtgcataaaagtcaactttgcaaatgtaagattttccttttcttgatctcacttcttaaaaaaaaacaattttaaaaaaagaagtggggaaccatattaagaagcctaaaagtataggaaaggtataagagtttactgtccttgttttagcttacacgagattcaaaaaaaagaacaaaaagatctaagaattgttttaactagcactttgttaagaaaataacttccaagcaaggcatggtggctcatgcctgtagtcccagcttctcaggaggctgaggcaggacgattgctccctgaagttggagaccagcctgggcaacatagtgagacccccacctctaagatcaagcactacaatcagtgagaggtttatactaaaaagacaaagctgactgcctatacagtgatgtgctttgacattttcaccagtgacggatggcatatacggtggttgcataagatcacaatggagttgaaaaattcctactgcctagtgatgacatagctgccatagcattgttgtgttactcaagtgtttctggtgatgctggtataaacaaatctactgcattgccagtcatataaaagtgtatcacaaggctgggagcagtggctcacacctgtaatcctagcactttgagaggctgaggtgggcggatcacctgaggtcaggagttcaagaccagcctggccaacatggtgaattcccatctctactaaaaatacaaaaattagccaggcgtggtggcagatgcctataatcccagctactcgggaggctgaggcaggagaatcacttgaacctgggaggcagaggttgcagtgagcggagacggcaccactgcactccagcctgggcaacaagagcaaaactccctctcaaaaataaaaaagtatagcacatacaattatgtagagtacattatactagataatgataataaactatgttactggtttatatatttattatactatatttttaaatcattattttacccttttgaaacagggtcttgctttgttgcccaggctggagtgtagtggcacgatcatggcacactgcagcgtgttgcccaggcctaggtgggagggttgtttgaggccaggagttcaagaccagcctgggcaacatagtaacaccccatttcttaaaaaagtaataataataattttaaaattagccaggcattgacaacaggcacttgtagtcctagctcctcaggaggctgaggcaagagggttgcttgagcccaggagttcaaggctgcagttttttttaaaactttttacaagttcacaagtttagaaagtagaaaggtataatagtaaggttcatctaccattaaagacagacaaatattttctgaataaatttggtgcagccaaagtgttcagtgttcataaagtctacagtagtgcagagtcatgtctcaggccttcacgttcacattcactccacgttcactcactcactgactcaccagagcaacttccattcctgcaggctccgttcatggtaagtaccctacacagctgtaccattttttatcttttatatctcattttttactgtaccttttctatgtttagatacacaaatacttaccattgagctacaattactgtatagtaccatgctgcacaggtttgcagcccaggagcaataggccataccatacagcctaggggtgtcgcaggctacaccatctagatttgtggaattttactctaggaggttctcccaacaataaaatcacctaatgatgtacttctcagaaagtaccctcgttgttaagctatgaatgactgtattcatactttctctaggaagttcaaacagaacccaagttacaaaggacaggcaagggcaaagggaagagtgaaaaagtaggaaaggtagaaaatggcacccaagaacacaggcaaccttgcagcaggctttgaagaggagccaggagcacaactttcacaaaccctgtttccaatggcagggaggtatttatattctctctgcaggcagacagagagatcaagagtgccctcccctttatccattttaaaagcagaggaagacaggccagagctgtactcactcatggaagggagtctttcagggcaggtatggtttgcaaagtaggtgaagtcttcaggaagaaatgttgtagtttgcaggaaggtttcactgtggttcaagtcaagaggataatctagggaggtaaaggaaaaaagtcgatcagactggtatgtgtgatcaaccgtgcaattatcagatgcctaccaagtaagtctttctcttagctatcatcttggtagaaggagacaggactctggactaccgctttgatgcagctaaaaatgtgaacccatcaataaaaatgtcagccaaatggcagattttaaccagtgttcctattcctattgattttataggtttatatgcagcactcagtttacagtcaactgtaattaaatgtaattttaaaaacagcagttgccctcctctcatttctgttttctaaaggaaccacttgcccttcttttggccaagtatctcagcatttatatgcagtattcacctctgtcagcctctacggctggtcgtgatgtttctgttttcagtcttacctaccgacctcccacttatccccttccttctgccacccctgccacacgatccccttccattccccagtctcccatcggtcacatatcatagctgtggttaggacaatcttcagtctttgtattacgatgctgctgttaagtactagtcgtcgctgagaaatgtggaaagttatgcatcttgtttttctgtttgctcagttttatatgcaatgattctaattcaacaccacgcctttcaccaagacatttcctcctaagacatacattaggtattctctcaacttcatcctcccagaggaggtgtggcagcttctggccttcttccatgccaaatgtgcttggggggaggtattctctcggtgatgattcctcccttctgtactctgtgctgcctttctggagaatacagaacaggagttggatgtgagacctcccagtcctctgtctcatcttttctatccagttttccgtcttgccatttatctgccctactttccaagagatttcctcaactttactcaaccttcctttaatcatcatctctgctatcatattttttaactttgaagagctcttgtttcctgaatgttcatttcttactatattcttgtttcatgtttgcagtcatttttctcttattggtatctccagtgtcaatatctttgggtcttttctcctggtctgaccagattctccagagaaatccactcgaatctcctgccagaatggtagagtcctgactataaacatcctgaaactaagaaagaagagaaagaggctggggcatatgtaatccccatcttttcaaatactgtggtcatgccaggtatccccaggttgaggagcctctgttttgccatctctggggttattaagtctccagctcttgccaggatggggaaatgggtctgggtatctgactgctttttaacagctttcaatctccctttattttagttgccacctttgctcctacttcccatattgctagttcctgagcttctgggggatcctggggtggttgctggttctcctgttgctgctttgagcagtcagttttcttgggtttgttaagtcttttatcagtggttcttctgctttctacctaccaaggttttttgctgtggtctccttttgtgttctcattctcaagggtttataatttaaaaaccctcacatatgtatgcccctttagagtcacgttagtggatatgaagagtgtgatggcagatgtctttttcctaggggactgtacttgtagagtaggaggagggtcctccaacctcattttctacagatgaataactggaacaacatacacagaactcagaccaggagccctggctaatgcatgacagagctccaactaaactctgaatgagagatccttccagtatactgtattgtttttatttttttcacagaatattaaatccttttggatccatgctgattctatgaaaattaaaacatcctgttcaaattcactttgtaccctagaattctagaatcttcaactaagatatttttgaaaaagcactatgagcaggtttccaagaatcaaatggctaacacattgaatccttttatatatgcacacggctgcctactctgcgctgcctactctgcaagtactctggggcaaaattcaacgagaggcaacttgaaaattttaactgtgtcttaacaagggaaggaacagaatgctttctgtccttttcagtagtagctttcctgaaaaacactaagcctgcatttatagagaatagtagagactaatttatataaagacataaaccaggctgggtggggtggctcatgcctataatcccagcactttgggagactgaggcaagaggattgcctgagcccaggaggccaagaccagcccaggaaacatgctgagaacctgtctctacaaataattttaaaaattagccaggcctggtggtgcgcgcctgtggtcccagctactcgggaggctgaggcaggaggatcacctgagcctgggaggtcgaggttccggtgggcaatgatcacaccactgtactccagcctgggtgacagaatgagatcctatcttaaaaaaaaacaaaaacaaaaacatgaaccaagacagaaccttaaagataatatttacacagaaattctctgagctcagctcatacatgcaaacctggcctgggttgaatcttcttctgaaggtagtaactacttcaaaaatctatgtgaagaacccctcatcctaattattactcaggatgaatctaatagatgaaattattctcctttagaaaaaaattaaaagacctcacaagtaatagaaaatgtgcctgtgtttgtgatacgcccatgtgtggcaagagacgctggctggaaacatgtattggcacagtcaatacattcactagaaggcaatgaaattcccaaaagtattacactaagtatattttcataaacaaatcaacaaaaacgaagataataatcattctggtcaatgactgacccaagccctagagctagaacctaatcaggaaactagaatttaaaaaacatgaggcaagagacaagatatcactaactctaatgattctactatttggagtttctttgaagatagataaattcctttctacttccttcaaacaatgatacagtaagcctggtagcacctagcatgaaacaaaaaaaaagcatttatttttcttctgattactaaattaataatatgtcactgttttaagaatcctcaaatacgcaacaactctattgcaaaaatcttccagaaacttactctacatcttgggaggggtggcttaatttcctgatttcttgtttaaaaatttttaaataaaactttaattaaaataaagtctacttggaaggccaaggtggggtgctcacttgaggtcaggagttcgagatcagcctggccaatatggtgaaaccccatctctgctaaaaaaaaaaaaaaaaaaaaaaacacaaaaattagccgggcatggtggcaggtacttgtaatctcagctactcaggaggctgaggaaggagaatcgcttgaacccaggaggcagaggttacagtgagctgagatcacacggttgcactccagcctgggcaacaacagcaaaactccatcataaacaaacaaacaaacaaagtctgcttttcagtagcaatagaggccttttaaaatgaaagagacagaggaaattaattgctcacgacctggtaaaactatgtgcagttatcgtgaggagcccttgtttttctcccctgctagctgtccagcaacgggtggggttataccttatccccttggagttccaaatataacttcttactcttctaaagcatgtacctactgaatgaggaaaatgctgagagaaaaacaagcctgttgaatttctacagccacagttttactttttaatttaaatctaatctatttcaaacctggacatgttcttgaagggcaaagaaggcagctgcttttacatttagaaaatggaaaaacaagccgggcgcggtgatctctgcattttgggaggccaaggcggatggatcacccaaggtcaggagttccagaccagcctgaccaacatggtgaaactgtgtctcttactaaaaatacaaaaaattagccaggcacggtggcatgcgcctgtagctccggctactcaggaggctgaggcaggagaattgcttgaactcaaaaggtggaggctgcagtgagccgagatcccgccactgcactccagcccgggcaacagagcgagactttgtctcaaaaaagaaaatgggaaaacaggccaggcacagtggctcacatctgtaatcccagcactttgagaggccaaggcaggtggatcacctgagttcaggagtttgagaccagcctggccaacatagtgaaaccctatctctactaaaaatacaaaaattagccaggcatggtggtgggtacctgtaatcccagctactcaggaggctgaggtaggagaatcgcttgaacctgggaggcagaggttgcagcaagccaagatcgtgccactgcactccggcctgggcaacagagcgagactccgtctcaaaaaaaaaaaagaagatagatagatagaaaatgggaaaacaacagactcctacctacaggttcaaatggctactgatatcatgggcttgcagaccaacatttctgtccaacagcaactgcttattcagcattgcttcacaccagtggttcagcagccttggttgcacattggaatcatctaagaagctttcaaaaatcctaacaccaggccgggtgtggtggctcatgcctgtaatcccagcactttgggaggccgaggtgagcagatcacttgaagccaggagtttcagaccagcctgggcaacatgatgaaacctcatctctactaaaaatacaaaaattagccgggggtggtggcacccacctggtgtcccagctactcaggaggttgaggcaggagaatcacttgaatctaggaggcggaggttgcagtgagctgagatggtgccactgcagtccagcctgggtgacagagcaagactgtctcaaaacaaaaacaaacaaacaaaattctaacattcaggctatacctcaggccaattaaataagaatcgctagcagtcaggcacagacatcagtactttggaaacgtccttgggaattccaatgtatagctaagcttggtattgctaccctaatacctggaggaggtaaaaacctgccttctcccttgtgttaccaaatccagttgagaaggaatcgaaagtgctgaccaatggaccccagcaagaatcaccactttcccctcccatttgagaaaagaccaaacacttgcctctctgcttgaaaaaaatatggaaatttatatatactagaaagatgccactgggacaaatatctgtgaaatataaagaattagcattcttcaagagttagtccattaaaggatgactacctactgggagggtagccacatcgaagactacagactggacatctaaaaccaccgagaaagaggtgaagatgacccactccattaatagattacaaagcacaccagcatgactttactcactctgcagattcacaatctcacaaaccaatggctttcagtgacaacaggaagcttctcctggtcaccacttcaggtttatttccaggttcacagaccccatccccaaaagtctgttttcattcactaatcaccatgttgcttttaaacttaaagaaaaccagcatgacttaaatgtcaccctgggcttttgagctatgcttggcctaatgcagatgcctgaatgtgggtatgtgcctcagcattatttcagcagaggatggtgcataatccaggttaccaccattaagccaacagtgctccaggcagaagtggtcgggccagaggtgtcagtcatttggctgtctcagcagtgctgggcccagaataccctctctgactgtgctaggtagacaactgctttgaaatgaagaagaatgatgggttttcattaaatacactttcagtgaaatgctattttcttttcagtacaggttgagtatccccttatctgaaatgcttaggaccagaagtgtttcagatttctgattttttaggattttggaatatctgcattatacttaccagttgatcaaccccaatctaaaaatccgaaatctgcaatgctccattgagtatttttttcaagtgtcgtgttggcactcaaggtttcatcatgtgtggattctggagcagtctggagttggtattttctgattggggatgctcaacctgtacttactcgccaaagatgtgccagtgacacagcagctccacaagatggtgacctccttagaaacatgctacaacacttaagacgtgctttcttgttaaattcattccttcatgcatacaaaaataacttaccaagtgcttcctatgtgcgaggcagtgtataaggtactaaggatacaaagatgacaaaaggaatgaagccattactgcgattcagggcacaggccctggagtcagagaatcagcaaaccctaaccctgctgctgcatcaagttccatgacttccatgtgccttgttccttttatccctacaatggggacacagtagctaccttctgggttcttgtgagggactacatgaaatcatgtaagtcaagtatctaataaacagtaagagagtccctgatggcacagacttccaatctattagagaaataaacacgtttaacaaaaaatagattgttctaaccagagagatgcaaggaaaaggtatttgggtgtatgataatttgagaataaaagtacaccaagttcaataataacgggtcactggatacaccctccaagggtgaaactcacctctgtactcagttttcaaagacagcaactcaggaagtagcgcaatcctgtgttgccagaccggcagtggtgtggaaatggggtcctgctgcatgcccctctaacttctgagagaactgccagtactgccaaatgcccagagagacagatattccagcctcatctaacactgcagaagtatgacatctggactggataaatgtcatgaggacacaaatgttcccttactcagtgctatacaggggagagcgctctggaagggcagtcagtactgcctcgtttcttcacctaactagaagcaggattttggcagggtttagggaaagagtcacatgatcaagctgcgccatcttccccaagattatatgtactatgtgtgaaaaatgcaaacagcataaaattctgccttaactgacagagccacatgagtcgagtgagaatgtgtgtgcggattgtgcaaaacctaccaccacatgcaagacggaaactgcagggtttcctctcccaggtatggttcagagctcaggtaacttgacccagtgcgaccacaatttgtctaaaaagctctgaaatgtcattcacttgttctttgccaacaagaaagtatcaaaagtttatcagtttgctaactacagtcctctgttgctaaagtggacggcaaaggaaactgataaattaggatgtggtcaattcttttaaggagaggcaattcttttaagagaggcaatgttttctcttgattttctaagcgccacagaataattcgcatttgcaacatttgcaaagcaatttcacattcgacagtgaacttccaaaaatcttgtaacttattagagaagaagagaggactgatttagagggagaatttttttttaaatgtaagtattttaaaatattgggcttagacgaaatcattaagaagccataggaggctgggtatggtggctcatgcctataatcttagcacttcgggaggccaaggcaggtggatcgcttaagctcaggagtacaagaccagactgggcaacatggtgaaagccgtgtctacaaaaaatacaaaaattagccatgtctacaaacaatacaaaaaatgagccacggtggctcacacctttaatcctagcactttgggaggacgaggcaggagaatcacttgagcctgggaggtcaaggctgcagtgagccaagatcatgccattgcactccagcctgggagacaaacttagatgccatctcaagagaataaaaaaaaaagctcgggcacagtggttcatgtctgtaatcccaacactttgggaggccgaggcaggcggatcacctgaggtcaggagtttgagaccagcccggccaacatggcgaaaccccgtctctactaaaaatacaaaagttagccaggtatggtggcgcacacctgtaaccccagctactcgggaggctgaggcaggagaatcagttgaacccgggaggtggaggttacagtgagccgagattaacaccactgcactccagcctgggtgacaagagcaaaactccatctcaaaaaaacccaaacaaacccagaaagcacattagtcctcagttacagaaatgaggcgaatcatgaatccttagtaagatgaaatctcagaatctattttttaaataaaaaccatccctggctggactagagaggcctcaagagagtcccacttaatcatgtggaagtattacttccttcctgtattcagtttttgaaagagttgaaaagaaagagccctggcacagtggcttatgcctgtagtcccagcactttgggaggccgaggcaggcagatcacttgaggtcaggagttcaagaccaacatggccaacatggtgaaaccccatctctactaaaaatacaaaaattagccaggcatggtggcatgctcctgtaatcccagctactcaggaggctgaggcacgagtatcacttgaactggggaagtggaggttgcagtgagccgaaatcacccgttgcatgccagcctggatgacaggagcaaaactccgtctcaaaaaaaaaaaaaaaaaagaagtagtcatccagtcactcttaatgtattatgctatagtttaaatgtctgtcccctgcacacctcatgctgaaatgtaatccccaatgatggaggtggggcctacagcaggtgtttggttcacaggggcagatccctcacaaatggcttgctgctgttgcggtaggttctcctctattagctcccacaagagctggttgttaagaagagcctggccctgccctcctctcacctgccacattgcttcctctcaccatacacacaggcttccccttccccttccaccaagagtggaagcagcctgaggccctcaccagaagcagacgctggcatcacacttcttgaatagtttgcagaaccataagccaaataaatcctttttctttgtaaattatccaacctcaagtactcttttatagcaacacaaacagactgagtcatattgttaacaaaaatgaacgaggattcatttggcaagagcttttttagcagtaaagtaaaactcagccaaatccctcttttacaatgcgcttttcccattgaaaataattattgcaaccgaatttacctctcttgggaggagacattctaatcagaccacctctttactaaaaatatacctgagtcatttacactgctgttcctcttggcataagcactccgaagcacctgctcataaacctgagcaccgattgttctcacgttgtcccggatcagaatgccttgggcttgcatcatgaagaggtaggtgttcactgcagaaagcaaaaaggggaaaaagaggtggattcagaagcaatcatttaaaaaaacataccacatagctatggatttttttttctttttggacttttaaagcctcttttagttcttttaaaaccctacatgaccataactctattttccatacctttcaggacaccaacatcttttgggtagctagtagagcttagaggaatttctgtcaatatccaacagttctagaaaaagcatcaacttaaaaaaaaatatattccatctcttctccaaatacccaatctgtattctagcactctgatcatcagaagaaagacctttatgaattagttaaaactttttttttttaaaggtttctgctctctttaagttcaccttctcagaattagttcatggttcttcatagagaaaagaaaccactgactctctgactgctagaagcactgaagccatggtctgaagccacggtctggtcttggcaaccttttcaaagtggtagactgaggctccaatcacttacccttgggagatttggaaagaaaaaggagtaacgaaagactatttgcagtcctcactatccacccatcccagcccaaaagtccaaagcaatagggaaagagcacagtccaaggtcaattaaaacatgctcttaacaaatgagtgttcagattaacctgccaatcttgtcttctttggaaagtgatctccacttgcattttcctgaagtctctctatgatacaaaactagaagctcacaaacacgtcaaaatgtaatccctatattctacttgcaaactccactgctatgccatctattttcaagaaacagtgagattgtaaaacatagtttcttaaccagtcactctaattccctcaaattgcctttgtcattgtgaaagggggatgtgttacaggggtggaacatttacaaatctaaactttgtgggtgtctgggggtggattcatctaaccgcttggctaacctcgggaccaggccccagtgcctcctccacactcaatacatctggccttgggatgtggattccggctctttgacaaaacacttggctgacattaggtttcatcactattaaagcagtatcctgtacataatgcgcagcaaacaatgactgaatggaataatggacgaagcttagaagtcactgtatttcaagctagtgcttttggtgctttatactgggaatgacagaggtggggtgggttagcataatgtcaaaaaccccacgtggccaacattaaacagggacattgaaatctttcgaaagatttcaaatcatctcttaaggtatatcccaagccataaaataataagcaaaaaggaccagtgttcagaatgctttccgaaatgagggagcagtttcaaatgcggccttgcattgattgggagacagccctatgcttaacttctggcaccgtcggagaatagatcagatattgtgtttattctctagtagctaggaaagattttaaggaaaaaagacagcttccaattattaaaaaaaagtataactgtgtgaagtctctgaaagcaggagtaacacctcattctctatttccagcagataggacactgccagtcacagtaggggggcagtccacaaatacttgttaaacctaagacttaaacttcatctaatatcacatttctaattcagtcctgtgttgttgttgttgtttttaatcatttgggctgtgcagtatgttcccactgccctgaaatcttcctttcatcccaacatattactaaaccagttgtcttattgaaaattttgtgtaaagcttttattgtatttattgaaaatcttgtgtaaagcttatagtaaggtgccgccaagaactcactacctcctttcctctgcactgcaaaggacacagttgcttagcccctcctttaaacactctccctttcttagctttgcatcccaactggaggattcctctagggcagtcattctctaatgtttcccacccatcccccagagtgcttttaagaagcctgtttcctaggtcccactacccagactgatgcatctggtctgagtggggcccatgaatgtgcacttgtaacaagctcgcaggtgataaatggtgctggactaaggaccacacttctataaccactgctctagggaactctggccacataataaatataagcaacatttattgagtacttaattacataattccttactgcatttaatcctcataattatcctaagaggcaagtaatactatccaatttacaaacaacttctaggcttcagtttctccaagtatcttcacaaaggtcaactgagagcactagaatttgaaccaggtgtgtctgtgctcttaaccactaagcttttatacctcactcatccatgttctagccacaacctctctctgaaagatttcaagcacccacatggcttaaatgcttactcttaaggagatagctctcacatcttcatctcctgcacaaagctgccagatggatctttcttgacctttcttaattacagatttatccacactgttactgctcaaaagtcttttacgtctcttgcctttatccctgagctgctgctacagcaaggagtctattctttctgccgtgcaaatcccattaatccttcaaaccccagttcacagacctcttgaggaagctttcagtaccgtgtcagtctccccccttctccagtttctgtgatggtctattacagactatcaaaacttggatttgtttccatgttgacttaattcactaacaactgtctcgtgttagtctcgtcattcaactaataaattaacgtaaaccacatagtatttttttttctaattatcgaaaggaactagcacaatgctaaaaaaataaaaactgagggagtaaagattgccaaacaaaaggaaataatcacaaatccacaacttgggattggatggcattttaaggaacactcaccaatatcatcgaatgcttcccactactggggaactatgacctccaagaacacagagtcaacagggaaaatatggccatcagcaaagaaaacctactttggttgggtacaaaatgtttcccagtcacttgttttttctttttttcttttttttttttgagacagagtctcagtcttggctcactgcacctccacctcccgggttcaagtgattctcatacctcagcctcccaagtagctgggactactacaggtgcatgccaccatgcctggctaatttttgtatttttcatagagacggggtttcagcatgttggccaggctggcccagtcacttttgcccactggttctctctcaaccttccccagacaccctctcccactcaggccccttctatgtgtgcccctcccatatcacaacttcacacaacttcacatcttcatcatcacaacttcatcatcacaacctcactccccatccaggctgcgctctctgcatactggcccagttgtctacacttgacaaagagttgtgaccacactaacggagttgtccagatgcaataggatgagcctagaaacacacaaaccaccagcagccctgttccacctgttaccaaagatctgtaaaagcaagcccctttttggagattcacaatgcacaataactcaaggcccagaaattcccagaagagagatgtttagttatttagcctgccatttcccaaaccagaacatcaagtgagtctctgcagaacttactttgggaaattcagttttggatatttctatgaatagactttttaaacgtccattacatggttaggtaatcaatcaatcaatctttgctgaatgttgttggtaaacagcagtcacatcctattactaattcatatcaagcttgctagaagcaaaatccccttaatctttttagagatgctaaattgcccttctcctgtgcaatgctcatgtagttggttatacaaatcaaactgtaggacctttcaggtgtctctattaaaagtcttgttaccggttgggcgcagtggctcacatctgtaatcccagcactttgggagtcggaggcaagaggatcacttgaggccaggagttcaagaccagctgggcaatacagcaaaatcccgtctctacaaaaatagattttaaaaatactagccgagtgtggtagtgtgcgcctgtagtcccagccactcactcagatcaaggctgcagtgaaccatgatcgtgccactgcactccagcctgggcaacagtgagatgctgtttggttaacaacaacaaaaaaagcagtcttgttaataaacttaggccatggctctggcctaaagtaggaagtacatatgcatacacatgttgctttcaatctaaattatctcattcaaaattcacatctctgtgaagtagatatcatcttgagtgtttattttagattaggaagtcaagtcctccagggggtaatttgcccaaggtcatatggttagagaaatcaaaaccagagaggtgaactgagttgctgcatatattttgatgagctttactttgtttttttctttttgttttttggagatagagtctccctctgtcgcccaagctggagtgtagtggcgcgtctcggctcactgcaacctccatttcccaggttcaagcgattcttctgcctcagcctcctgagtagccgggattacaggcacctgccatcatgcccagctaattttttgtattttggtagagatggggtttcaccatgttggccagactggtcttgaactcctgacctcaggtgatctgcctgccttggcctcccaaagtgttgggattacagacgtgagccaccgcacccagctaactttgaaaattctgaaagcagtactttctaataatatggtcctgcgcaacagtggctgaatcacagttaaaaaaaacaattttaagttggtgtgcagtggttaaatcctccagtttcaacgagtctctactgagcacctccttcactgtgtgcttttcaggcaccgtacgagggcactggaggccaagtatgcataaggcaacgctgaatagatgagtaatgtatagacaaaattcaacaaattacaatgcagtgtggtaaatgcgacaacatttaacacaaattcacacttactaataatttgttttacactttcatgagacaatgtaattattatccagcctcatatctaggaggagggatctcttatatataaccataattcagttgagaaaaataagccccattcaggtctacacaattagaaatttccattcagatgccagtgttagcagccttgggccatggcttaactggacagcttccgggggcgaaggactgggtttcctgcccttcagccacctcttggccacacaatggtgcctttcttcctctctgcttctgattctaacaggaaaacctcctcctttctcactgaaccttaatgtgtatccttaatgtttgctgtggttggcttggtaagctaaaagagggttcagaaccagaaaagaaaccattcccttcctgaccactttttacaatctgtatctcacccccaacatatgcaaacatacaacacacacacactcacacccaaacaccaatcaccctcctctgctttggttttctacttaacatacaacatattttaaaatttatcttgtcccccataagaatgtgagctccattagggcaaggctgttgcctacttcctttaatgctgtacccccagtggctagaatggtgtgttgggaacacagaggatgcataataaatatctgaatttaaaaaataataataataagttgagacaatatagagttttctgaacttggctgtgctccaggaggcatggagatggatttcaagcccttctctttattttgcattagccccctcctcctttctgagaggaacccaaaatactgtaagttaaccagtttcactgcactaacctgttcctaagaaaagctcagtcattcctttccaccaattgagcagcactgccaaaaagattagctttccccccaaaatgttctgttactctcattcctcataaagcttttaaaaacatgttccatactataatgcacaagtttattcaaaatcttgtgcaataatatttgtagtagaaaaacactagggaaaaaagcctaaatgaccatccaaaggagactggttgaatacatttttatactcactcccatggatgagtaccatgagaccataaaaaagaatgagaaaacatttgttatagtccaaaactagaaagaactcagaagagattaaatatttgtagcctattccgattttggaatactatacagcaacaggaataaataaactagaactgcatgcacccacgtgaatgaatctctcacactttatgtgacacaaagaagccagacacaaaagaacacatgtggtatgattccatgtagataaaatacaaaaacaggcacagctaatctacaacataaaagtcaggagaatggctaccctggagtgcaggagagttgaaggtggcttctggtcatcttatttcttaacctggatgctggttattcagatatattcattttctaaacattcaccaagctttttgcttacatgtacacattttaatgttatatgtcaacaaaatttaccttccccaaaaataaggtgagcaaaacccatgaattgacttccaagacatattatgctacttaataaagggaaattgatatgcactcacatatttttacaaaaaaaaaaacataggaagagtaaaccagaaactaataaaaatgaaggggtaggactgaggcctgagtacaccttttatattttggacatttacgtattaaaaaaattatctagctgggcatggtggcacacacctatggtcccagctgcttgggaggctgaagtaggaggctggcttgagcccaggagtttaagtccagccagagcaacatagtgagaattcatctcaagaaaaaaaaaaaaaaaatatatacatatatatatatatatatatatatatatatgaaaaatgggcaaaccctaaaactaaatacaaacacaaacaaataattctaataatacattgtactgaaaacacaaccaacggaaaagtactccgatacattctttgagagatatactgtaaggacaaaaagaaccgtaaagaatctggaactctgtttagcaggtctgttgattacagtcatatttgggtcataatcatgacatggaaatcaatggatgctaaaaccctcaggtgaaagggttgttgaagaggatagtcaaaacacatattcaatgcaccaccccacaaattacatgttgatcacaactgacatttgtaattttgctgcataagaggaagatctagcaggtcatccctttaccaaatgtctcaactcagcaaccccaatattagaacaacctacagttccaggctcctaatgcaatgtaagatatttacttcctatataatattcttgctaatctactgaagagaaaacaagaagataaatctagaatatcccttaagagttgggatctcactctgtcacccaggttggagtgcagtggcatgaacatggctcactgaagcctccaactcctgggctcaagtgatcctcccaactcagcctcaggaggagctgggaccacagcggaatgcccccacacacagagctaacatttatatttttttagagatgaggtctccaaatacacacacacacacacacacacacacacacacacacacacacacacacactttagattcttcaggctgaaagaacataggatattctacaaaataactgatctggaccaaaaaaaagcaggggctattctagattagagacataactaaacgcaatacatgaactttgactaaattctgaatagaaaaatcagagtgctaaaatagatatttttgagacaagtgagaaaaattaaacatggaatgtatatcagatattactaaatgttaagcttaagtgtaatcatagtgctgtgattatgcataatgcgcttattctcaggagatgtatattgaagtatttagaggtttcgcatcatgatgtctacaactttactttcaaatgcttctgaaaaaaatgtgtgcatatgcacatatgcatgtatgagcttatgtatgcatataaaaagttaaagcaaatgtgacaaaatgctaccaactggtgaactcaggtgtagagcatatatttattgtactattttctcaatgtctctacagatttgcaatttttttccaaaagaaaaataaaaggttgttaattaatgtgttgcaactgccaggttaagtggcttactgttctgctggacttcaagctttctccaaaaggggaaaagtaaagtggccacttactctccaggagtggccaagttcccaactttatttaatgaagaaacagagctgggcacagtggctcatgcctgtaatcccagcagtttgggaggcctaagcaggaggatcacttgaggctaggagtttgagaacagcctgggctgttcctagtgaggctctgtctctacaaaaaaatttaaaaatcagctgggcatgatggcgtactcccaagctacttgggaggccaaggtagaagaatccttcgagctcaggagtttgagctgcagtgagttatgatcatgtcactgcactccagcctgggtaacacagcaagaccctgtctctcaaaaagggggggtgggggggtagtagtaataataataataataataataataataataataataataatgaagaaacatcaagtcctaaggactttttacacttctataaaacaccagctacaaagagatgatgaattcttttataaatgttacaaactgtaattcagacatacattcattcaacactcattatatacataagatgttccaggactgccctatactctaaagataaagagatacaagtaagacacagtccctgccatcaccttgcaatggaagaatagtcacgtttgttcaggggtacaggagagtggctactagatcatattgggagcaggggccaggaaaatactctcagaagaggtaattctagagtatggtcctgaaagaagagcactgaagcaggagagggagcagcataaatgaaaacaaagagccatccagggggaaatacatctgaggaatcaaagaagtttcatatggctggagcgaaggttgcatatggcaagaacatgagacgggaggctagaaaaatggggggagcaagagcgaaagggcttcacgcactatacttggggtctgaacttgattctgaaagccacgacattgcagaaacggtccaggattggatttccagtgggccaatgagtaggtatcaatcggaacaagtaaatttaccctactcaaaattcctggctccagattaaggactgaactttttagtatccacatctaaattcttagatgaactaaataagattctgtgtgtagaatcccccaggtgattaataaaagttgggagcctgaatcttagcaaagactgtactttctacatggagcaatgcagaggaacaccacatctccatggcatgtagagtggagggaaaatgtcaagatataaagctagacacaactgaccagagccagaaagaatgacactcagcaaaggtgctgcttggtgctcaggggggtctgttagactgggttttctttctctgaatttactcacatcatcatcccactataaaatgtgggatttataacagagtcaaataaattccagaaaaacactggagccaatctatggatcacaggttctacctctttagcatgtccatgcttttggcataaagaacagggaaaagggaagagaatctaaagagaagagaagcagaaaatgaataaatagaacaggaggctccctctcacgctcatgcttgctagtgctctctccttcccccatatacaaaatacacagataagacacaataaaaattaaggaaaaacaaaatgtgccaaaggaatgttgaagtttgatttctgccatgctagagtatctgcaaaacctgcattatctttttagaccaatattttgtggaaaaagcacaacctgaaaaataattcaaccttacccccaaacaagcagatgatcagtgttcactgctctgcacaacaggtaaagaaagaatctgcttattctgcttataaagagatggattcctatacaactaataatgcatttattgagtccttatgtgccagcacctttccaaatgcctgtgttttatctcatttcatcctcacaataactgagaggcaggttgttaccatcaatttagagatgaaaaaaactcaggtctgaatacgcaatctgaccatgtggagccaagatttcacagcaggctttgtctccagagtccagatttttaacaaacatgctctactgcctctcagatgctcaatcccctgaatccacagctactatgctgcccacactttgtttgattccttttacttggatctttttgaagtgtttttttttttttggcttgtgttgttgttgttttttttgagacggactctcgctgtcacccaggctggagtgcagtggcgcgatctcagctcactgcaggctgcgccccccaggggttcacgccattctcctgcctcagcctcccgagtagctgggactacaggtgcctgccacctcgcccggctaattttttttgtatttttagtagagacggggtttcactgtgtcagccaggatggtctcgatctcctgaccttgtgatccacccgccttggcctcccaaagtgctgggattacaggtgtgagccaccgcgcccggcctgttgttgtttttgacaggatcttgctctgtcactcaggctggagtgcagtggcacgatcatggctcactgcagtcttaacctccctggctcaagcagtcctcacactttggcctcccaaagtgctgggattataggtgtgagccaccccgcatggccaatattacctggatctttactgtcaacatgtcatatatttcaggcttccaatattccacttcaggagtgggtgccaatactcacgctataatgcatcccccaaattttataagtttgaagctctaatgtgaatcatgaatttttccattttaaatctgcttaaaatgctggatactcatactatgcattacatacattaacatacatttaagagagaaaatacagcttttttaagatacaaggaatttttggcagcaaaatttacacccattgtcttatctatttaaatattttggagcaaccgtgtgacaattttcatacaaaaagtgtttaaagagaactgggaggaggggggacacatacacacattaacaaagtaaataatacaaaaaaatattttgggggaaaaattgatttgaggaaacttttgctttcctaatccttctcatttgaggcagaaaaatcacaaagtcattcgtaggtttcatttttcaccctaattactattcctagctattaaaaaaatccaagtggtaaaaattaacagctatgaagtaccctataaacatttccactgacctattagtctaccatctgttaaattattaaactgtacataagattagacatgaaaatgctgtctaaacagatactagatggctgggtagcctatggtaagtactttactgatctaagcttcagctttgcttcccccaaaattcttaatagcatgaccagttatcaaccctcagaagtaccaatatccacatgcacagccacataacctcagtataagcttgggtgggagaaaactgtaaattaccttgctggttccattgaaactgaacacgtacacttatcaaaacaaccctgcggagaatgggtgggggtggggggggcgtcagggtatgacggatgttgctgatgggaatgtgctagaggcacaagaccagcactgccacactcctctgtggaactgaaaccagaacaaaggctctgctcccctcacctccgcaccccctcgtcctaatctctgtccgtcaccgcccccactccaccgaccaatccctgtccctgaattgccttgtggttccagcctcccacccccactgacacctcctctgtatgaacgtgcttttgtgacacccgctcatactaagctttttttttagacagtgtctcgtcctgtcacccaggctggattgcagtggcacaaacacagctcactgcaacctcaacttccttggctcaagcaatcctcctgcctcagcctcctgtgtagctgggaccacaggcgtacaccaccacatctggtgaatttttttatttttgtagaggtagaatctcactttgttgcccaggctggtctcaaactcctgggctcaagcaatcctcctgcctcagcctcccaaactgctgggattacatgtgagagccatcatgcccagccaatactaagctttaatgtccctttcctagcttttcctggtatcatcccacccccaagattagaactgcctacacctatctttgggctctttctcaactgatacaccaacttctatccatgacctctacaaatttgagcatgtctctctcttccaatagactgtaagctccttaagagtacagacagtcttattcttttcttcatcaacttctgataaatagtaggcatttagctatttattaaagaattacataggctgggcgtggttgctcacacctgtaatcccagcactttgggaggctgaggcaggtggatcacctgaggtcaggagttcgcaaccaacctgaccaacatggagaaacaccgtctctactaaaaatacaaaatcagccgagcatggtggtgcatgcctgtaatcccagttactcgggaggctgagaaaggagaatcacttgaacctgggaggcggatgttgcagtgagctaagatcgcgccattgcactccagcctgggcaacaagagcgaaactccacctcaaaaaaaaaaaaaaaaagaattatagcttggcacacagatgctgtgatagccggaggagttgccttgcttttttaaggtagaagtatactggtttttctgcaaccacaaaaaaaaaggctataagccagaaaaggtcatagtgaaactgatacttcaccaactgtgctggtgttcgtgcagactggtataaaccctttgggaaaactatttgcaaattcaacaatagccataaaaatgctcataccttctgagctagcaaagtatcctaaatatgaggctattctatgcacaaagtttttacttacattatttctaaaagcaaaatcttgggaaacaactcaaaatcaacaaccagcagctctcagtgctgctctgcctgtggagtagccagtttcttttcttctctaataaacttgctttcacttactaaaacaacagcacataaactgtgacacaaaacttgacggaatcttacacatctttaaaagtgaaaactatgcaaccttatcaccatacaccttatgtataatatttagcatagactatcacatttttaacaacatgaaaaaagttctgctatatcttgacaactattgctaaggaataagaacatgtatcaggctaaaacagacttgaggcaaatttaccaacctgctttgctgttagggagtaacagtgatgtgagatgaccttttttccttctgttttaccaatgttctttacaacagtaatgatttatttttttgagacagggtcttactatgttgcccaggctggtctcaaattcctgagctcaagagatcttcatgccttagctcccaagcagctgggactacaggcatgcatcatggtgtctgactgagtgagggtttaaaagaatgcaattctatagcaaaaagttgaatttcttcaacactgaactgctatctgcctacaactaagtttcttctaaccctttgcaaacatgtaacgtaaaattttaagttgacactacaaactgcttgtctaaatgagtcaaaagactgatacctgttctaccaaagcctcaccaacattcagaggctttggtggaacaggtatcccacaccttgttgatggaaacaaattgatataacctctagagaggttggcaatacagatcaaagtgaaatgttcatactctaacccagtagttcctactttcaggtattcatcctaaagaaataattggataaataacaaatgtgttcaatactgtttatctcagtgctacttataaaagcaaaactccaacctatctatgcaccaaaagggtctggaaaaaaaattatggcaaaatcagaccatgactaactcagctatcactgaaataatgattattgttttagaagtactcactatttaaaaatcataccgtgcaggccaggcacggtggctcatgcctataatcccagcactttgggaggccaaggtgggcggatcacctgaggtcaggagttcaagatcagcctggtcaacatggcgaaaccccatctctacaaaaaatacaaaaattaaccgggtgtggtggtgcatgcctgtaaccccagctactcaggaggctgaggtggatcacttgaacttgggaagcagaggttgtggtgagttgaaatcatgccactacactccagcctgagtgacagagtgagactctgtctcaaaaaataataattttctgagattatgtctgcatttgtgctaaataatttacgctaggagcagtaataaaagcagagatgaagctattgattcaagacggtatatacattgtatatatactacatacagtatatcacatttgtgttaaagacacaaaggaaaatataagcctagaacagttttagaaatcacttatcaagatgttcagtgttttttatctctgtgtggcagaattacaggtcatctgggttgtcttttctttgttacaatgcaacatttccatgaacatcagaaccctgtaagataaggaggttctctgttccactagtgaaaaactgcagtaaccaaatctgtttaaatcaactgacccaaaatttcaaagtttccaaagttactgagaaccccttttcacacagcatctactttatgagcaccctttaggaatgctgcctttgggcagggtctttttcttttcatttttttttaaaacaataatcaataaatttttgtatggggtcgggggaagcacaaaaacacaaccttctgccttagtaagagattcctcccctcttcattgctccagaccctaataattcccctaatctcaaactgttattctacccccaaattatcctaccccaaatgattcataatgatcctaaagctcttggtgcttctagctttaacttcatcaagcaagtttcctctatctagcctaccatccaaacatattcttccacatactgttctttggtctccctcctgattctcttttggaaagattattcttcatgtcctatggggataatatattttaatcacattattgttagcctggaagcttgtaacagactaatgggttatctactcgttgggaatttaagtgcttccaagaaggcagcattccaactggtattaacacccaaactgtcaaacataggaaatcagagccatgctttccataaaaaggcaaaagatgccagagaaagcacttgaaaatttctagcttctaaggcacacacacttagcaaaacaaagtctttccttaacaccttgtgggtaatgaaacccttcctctcctccagatggcttgtcttttgcatatatcaacttgtagtcctagaaacgggttctctgggccatgcagaatgctggattatttttctgtcatctattatgacagacagactctgtcacttgatcagacataaacttttctttctttagctaagtaatgttcacattttaaagcaattcaagacccaagtccacagaaacagaagggccaacctactctacaaaggcacgttggaagagcatgattgatggaaacttgtaaggagtcaggcaaggtggctcacacctataatccaagccctttgagaagccaaggtgggtggcttggcctcgacctccgcaaaggcttggatttaaaaaagaaaacaaaccagaaaaaaaacaaacaaaaaacaaatcttgtaaggctacactttggaaagaaaatcaaaaacaaattcttcccacagatcacataactgcaaagggggaaacgtgcatttacaatggagagatcagataggtaccacttaaccaagtgcccaaactgggttatcaccaactagaacaaactaagattaccttctgagtattcttgccaaaaacttttaatttaaatcgaatcaagctcttagacttatcttctggtttacaaaaatacagtggattggccaggcgcagtggctcacacctgtaatcccagcactttgggaagccgaggcaggcggatcacaaggtcaggagttcgagaccagcctggccaacatggtgaaaccccatctctactaaaaatacaaaaattagctgggcgtggtggtggatgcctgtaatcccagctactcaggaggctgagacaggagaatcgcttgaacccaggaggcagagattgcagcaagccgagatcgtgccactgcaccccagcctgggtgacaaagagagactccaactcaaaaaaaaaacaaccagaaaactagggaacacatcaaagtgacactaggcaattccagaatgtaggacatgcaataatactggcctgaactctttctcaaagagttactacaatgagcagtggatggggtgagaaagctactaaagactaacagacataaccaaatgtaatatgttattttggggatgggggcagctacaaataacattctgagcaccactggatgaggactggatattagaaagtattatgatcacttctcggccttctggctaagatcaagtattgaaaagattatgaaagtactgttaattttcttagatgcaataatagtactttgattaaacaggagaatgtcattttttaaagagatgtgtgctgaagtatttaaaggttaactgcctggataattatcaacaatttaacgtggctcagtggagaaagcagagccacagttcaaacaaaaaaagcaaaatagtggtaactgttgactccagatggaagataatgcttttattgtgttattcttgcaacttttctgtaagtttgaattttttcataataaaaagttctgggggccaggcatggtggttcacgcctgtaatcccaccactttgggaggccgaggtgggcggatcacgaggtcaggagatttagaccatcctggctaacacagtgaaatcccatctctattaaaaatacaaaaaaaaaaaaaaaaaaaaaaaaattagccaggtgtggtggcaggtgcctgtagtcccagctactcgggaggctgaggcagagcttgcagtgagccgagactgtgtcactgcactccagcctgggcgacagagcaagactccatctcaaaaaaaaaaaaaaaaaagatgtgggaaaagtttggtttgggatgtatctagattgccaactaaacctaaatcaaagtatactaatattaaaaatcctgtaaatgggccaggaattgttacagagggaataaagaccctagcaatgttcacataagaagttaaagcactgcggggtttttctatgcccgtaaagtattctttagtctttggaatcaagaactgcatttagggtcgggtgtggtggctcatgcctgtaatcccaacactttggaattacaaaatcccaggaattagtaactttttttagtgagtctgcaaatgttactgaataagccagccgcaggactgctcatggaaggggaagggaggcacaggagaccgaggtgggaggatcacttgagcccagtagttacagagaccagaccagcctgggaaacatagcgagaccccatccctattaaaaaaaaaaaagaagaagaagaagaaaaagaattgcatttagtctttacctataacgtcctataatgtcataggtgaactaaaagaaatgataaatatatcctcctgttgtctctcaatggctttccaccactttcaaggtccaaattcctcatgcttagtatgactcagaaaagtccataaaacctggctcctgcctctggaatttcagttcttgccactcccaactctacccacaatggacagttctctggaacctgctaagatctcagacaatgctgctcctactggctaggtgcaaagacacaaaaactaagatttcaaaagcaaaaaatcccgggaaaaataatctatcacaacaaaagcatgagctcaggaagaaaagggagtggaggggataagagcaggggagggggaccaaacccaactttgcctcccttccccttccacgagcagcctggtggctggcttgttccgtgtgttcagtaacatttgcaaggaccaaaaaaatcactaattcctaagattgctgttactctcaaacaaaagtcaattcccaagcccacacaccccacagtcaagctgagagttaaaactcagaaaactcaaaggccttaggatactgaccctatgctggcaaccacatagctcagaaatgcaacaaatattaaattatggtgtcctgtaatggatttacactttacttttaaatattaacaagacggccacagggagtaagtttatcaagggataagaatcctaacagtacctcctagttcactcagaggccaattaacatttcccaccacgcccaacaacaaggctcctgggggtgttcaaagttgcttatgaccctgtggagctatcagcaggtacctctgccccagaacctattatgagcaatgcactaggggctcggtgcacaaggaaacacctgaactacaactacccaagcaaatatcatatctttgtaggttgtcgggtttcttcagctgtctgaagatacaaaacctcatgtgactgtttgatttttagtctcttctcaccttggtcttcctttctcacagttatttttaaaatcagcaactggctaatatttgaaaactgtcagtagccaactgtccgtttcacaattagatcactgttcaaaaggagcagaattttcaactctagactttagttcaacaagctagcaaatcattacaggaatgagtgacttcatctttacagctgggtcgctgcactatgaggctacactaaaatatacctaattgttgaattccaacatgtctgtaggccctccccgcatcttcaaggttagagtttttattattgcatcctcccccaacccaacccccccagacaaagcttggcattttcggaatccctactcataaagtgactcagtccaccgatgggccaactgacaaatccttaagggattaagatattaccaggtaaaaagtgacttttaaaaatgtacataatacatatatatgtagagagagagagtgtgtgtgtgtgtgttacaggaaagctattaactatactatgaataaaacaaaatttcactgaaaataaaagtgatcaggtagcactgactacaaccttctaaattccccctaaatgaatccacagaaagactttcttgaagggtcttttgctaatttgcggttagaacacaacacactcaagaaaatgatgctcacagcaggacactaatactaagtaatttctgagattatgtctgcatttgtgctaaataatttatgctaggagcagaaataaaagcagagatgaagttaagctattgattgaagactgtgctaaccccattaaaaataaagagaggtatgaatgtgtgccttcacaactcagctcaggatatacttgccaactgagctcttccttccgtaagaaggcccattgctcttggctactgcgcaggggctatgaaggccccatggttctaggactagagcagatgcgtacaaactccctaaagtcacaggaaggaaggggaggcacaactggagagaagttggtgaactgcctctctggcccataggggcatgagggcggggggcacagaataaaaccataaagcaataattttcactatttaaaagaacaagtctaaatggcacacatcctctgtgtctaagatgactagcactgctgttttttgatgagtcatcaagggcagtcatgctgaaaagcagggatacttctgtattccacctatgtaatcattccaaaattatgggattggaacattacaatacctatgatgtatgtccttatatttgtatgtgtttgtgtgcttacccttaagtggtgttttttgttttgttttgtttttgctgacttctttgttctagggggtatttctgcagccttctcagaaaaacctcagggtattagagaaggtacaacttgctaatggcatctggtgagcatgggctggaaggggaaccaccgggaaacacagttgtcaataaccacacccgctatggtgcaaacatgacccacatacaaactgaagtacaagtacaacccctcccaaaagtctagccctaagataatagcacagaaactaagcctaacaaggtgcttggaacctcttcctacctgcaccaaccaccctctgcacaccatccccagcaagaccccctgcctccaactcccctaaagcagcatttccaggatagcactattctttaatccactgacaactttggcactggctaaggcttactatttttatcccctttcacaccattctctgagcagaaatgctaggtgcaaacatttgttggtaattatgttaaagtaagtcttcttaagaacaaatggtaaaatgaatacatgaaaactttgcaatctatttttgaagaattgtctgcaaaaagagtggaaattgagtttttcttacgcagctgaaaggataaaacaaaaattacatataatcagaacacaatataaaataaggatcgtactcccccaaaattacatctgtatttggctgtgagaggtgaaatatctttgattgattgattgattgattgatttttgggatggagtctcactctaacgccctggctggagtgcaatggtgcaatctcggctcactgccatctccgcctcccaagttgaagcaattctcctgcctcagcctcctgagtagctgggattacaggcatgtgccaccatgcccagctaatttttgtattttttagtagagacaggagtttcaccatgttggtcaggctggtctcgaacccctgacctcaggtgatctgcccgcctcagcctccccaagtgctggaattataggcgtgagtcatcacgcccagcctgaaatatcttttaaatcttgttagcatgtgctctgaaagatatgttccaccttaggacaaacagcaaacaaactttatttcttcagaacacagcaaatggcagggtagagaatcaaatgacactggaagtggggccttgatctcacccctcctgatatggcaagcacacagggcctagagtcctgggctaaactaaaagatgaaggtcaacttggttactaatttcgcagagcaagtccaaggcaatcaaaatagaaaagcaaaaccaaccctggaactcacaaaggactggacacatgtcatggaattatttatagtctaggacaggtgaacaataatttggctggacaagaatgcaggcccttttctgagttcactctcactgttccaagaatgaagatgtcttgctattctagctgcaagacaggcaccagccatgagtccctacgtggtggtgtgcatgctgcctctgaaggacaagcctcataattatctggccaagatatcttgaaagaagcctactaatgcataaaatacataatcactgagccctggaagccatccaggtaccctcgggcctttgggagttggacagacatgtagcaaggacacattctctcaaacttcctcctaacacaagccttaatcaatattaagggttaaaaggtttcatttaacttcgataaagtaggtattagtactctcatagaaaaacaagctgagactcaatcactgctttcatttggcttaacagctcactactaggcttgctactaagaccttgaagatccttggcttccatatccacttcaatataaacattgttagtgctgttactggtaatgggggctggggggaatccccagggttcctggagcacaaagcaaagttccctccattctcctaattacattaatttaatcccttgcccactacatgattacattaaaaggggctgggggtggggagggtaacataaagccaagacccaaagttaaccacaatacaaaaggagagaagaatggatactatgatcttccttttaaactttcattatagctgactgcagaactgctgggatgactcaatagattatgggaaatggcctaaaagtctactggaaaccagactgaactgtggccacatcttaaaaataacctcttgcctctaattttcttctcccccaatttttttgactaaaaagggttttttgctgtttcgttgttgttgtttcgcaatcaccagtcctaaaatgaagctaaaaatttattttcattttatccttggtcattctctagcaccacaatcaagaacattaatgagtctttcctacaataccgaaagttagttaaacaaataccttgtttcccagcactttgggaggccgagacaggcggatcatgaggtcagaagttcgagaccagcctggctaacagggtgaaaccccgtctctactaaaaaaaaaaaaatacaaaaaattagccaggcgtggtggcatgcacctgtagtcccagctactcaggaggctgaggcaggagaatcacttgaacccaggaggcggaggttgcagtgagccgagatcccaccactgcactccaacctgggcaacaaagtgagactacatcttcaaaaaaaacaaaaacaaaaaacaaaaaccttgtttcacacatcagctgaactttcagtggacctgactactgaaccccaaaggacagccaggttttcctttaacacatattgctgccataaaaactgctgttatcaggcaaagaatgaataggttatttaggaaatatggcaaatatttaataactgatttttttcagtatacctgccttgaagcaacagggaaatattacaggacttggcccctaagctcagcaatttgtcaaatgagtaagtggtaaaatcacgctctccaagatacctctcactaaatacatttatcacattccagaagaagaaaactattttgacttgattgctacctttaaactgtccctttttcaggttttctatctatttcaaatgagacaagcttatcctttgattaaaatgccatataataaaatccatcaaatcatattagccagagggtcaacaatccagctattcaatagcattatcattattttactagtagcacaaataagagggctgcatgggctgaagagccatttcaacaagctcttggagtgttctggacacagagaccatgagtgttttggaacataaggctgagctatggagacccttctgcagcaaagaattcctgtcagaaataagactcgatattagaggttgttttaaaaaataataataataaaagcactgatgtgcatcctaggatgtttagcaaaattaaaacttaaaaaatttaaacttaaaaagcagtgaaacatgctgtaacatagatgaaccttgaaaacatgctaagtgaactatgccagaacacaaaagtacaaatattatatgattccatttatctgaggtacccagaataggtaaattcacagacacggaaagtagaatggtgattattagaagttgcggagaaggggactaataataggtggactaataatagaggttgagaaggggactaatttttaataggtgcagagtttctgtttggaatgaagaaatcaagttctggaaacgaatagtagtaatggttgcgtaatattgagaatgtacttaacgccactaaattgtatacttcaaatgatttaaatggtacttttttttttccgtaaagtgaaagcaagtttattaagaaagtaaagaaataaaagaatggctactccataggcaggacaacctaaaatggcctattttatgttatgtatattttaccatatattttaccacaatttaaaaaaactgtacataaaaactagaattataatttaataagttccagcactttggggaggctgacgtgggagaactacctgaggccaggagtttgagaccagcctgggaaacagagttaaaccttatttctaccaaaaacaattagccaggcgtggtggcatgcatctgttgtcccagctactcaggaggctgaggctggaggtttgtttgagcccatgtgttttaggttatagtgagctatgatcacaccactggactccagcctgcgcaacagagcaagaccccatctctaaaaaaaaaaaaaaaaaaaaaaatagtaagaagaacataggtggtaaataataaacttagccggaaggacactgaggttctgtatttaaaattcacgttaagagtcagagcgctacatgcatccgtaatcagaatcaaagaatccacactcccaaagtgacaaaacagccccaaactaatttctctcattttaatgctgcagatccccaaggcccagaccctggacttctcgatctacactcactcccttggtgatctcatccagtctcatgatttcaaataccacctgtttgctggacactcccaaatccttatattgagccctgacttctgcactgagcaccaggattgtagaccaacagcctccctgccatctccactcagaagcctaacagttacctcaaatttgtccaaaaccagatcactgtccttcccgtccacaaacctgttctaccgcagtcttcccatcctggttaatggtaactctacccttttaccctcattccttgtcagttcattctcaattaggcaaccagtggcattccttacaacagcagtcaaattttctaattcctctatttgaaaacctccaagaaaggctgggcgtggtggctcacgcctgtaatcccagcactttggaaggctgaggtgggtgaagggcttgagctcaagagtttaagaccagtttgggcaacctggcaagaccccgtctctacaaaaaatacaaaaattagtccggcatggtggcttgcgcctgtagtcccaggtccttgggaggctaaagtgggaggagcatttgagcctttgaggttgaggttgtagtgagcttccattgcatcactgcactccagcctggacaaaggagccagaccctgtctcaaaaataaataaataaataaaaaccctccaatgaattctcatctcattcagagtacacatcaaactctggacaatggcttacactaaaccaggagtcagaagctgtggtgggtgaatcctgcccagtgcctgccagtgtgaataaagcactgctggacaccctgtgcccctctgtgcactgcctactactgcttcggcattgcaggcagagttgagttgttgctatggactgcagagtcgaaaacgtttacatctggcccttcgcagagcaagtctgtctacaccagctcttaaatgatttcccttatccctctgacctcatctctctagttctgcacctcactcactctgttccagccacacgggccttctcgctgtcctgtcctgaagatacccatgcaagctctcaccacaggccactgacccaaccactgtcttggcagcgctgcccagacaaccacatggcttgctcgcacacctcctgaatacctcacttcagtgagaccttccctcatcacaatatatttaaaattgcaaaatttcctctctctactccctgcaaagcatccactttcctctgcttctccaaagcactaattacctaaaaggacacacaagtttgcctaccacatagcagcagcccaataaatatttgttaaatgtagttaagagtattattagtgagcctaaggcaaaaattcaagattccaattctaggccggcgcagtggctcacatctgcaatcctaacacttcaggaggttaaggcaggaggatcacttgagcccaggagtttaagatcagcctgggcaacataggaaggccccttctctactgacataaaaaaatattagcccggcatggtggtgtgcacctgtagtcccagccagttgggaggctgaggtgggaagtctgcttgagcccaggagttcaaggctgcagtgaactgtgattgcaccactgcactccagcctggttaacagagtgggagaccctgtttctggggaggaaaaaaaaaaagtgacatagaaggacgacatatgcttatatacaacaaatacaaattctcaactaaaagttaaataataaaagttatcctagaaataaactgttttgatttcacaaataatgttctccttagaagttgcaaactatctgcacataaatgtgctctgtttagtctaacaggtattttctggttttccttttatctttaagctgaataaattgtcaggtaaatggtttaatggttgaaagtattaactctggaggagggctagacaggtttaaatttttttttttttttttttttttttggagatggagtctcactctgttgcccaggctggagtgcaatggtgcaatctcggctcactacaacctccgcctcctgggttcaagcgattctcatgtctcagcctcctgagtagctgagattacaggcacccaccatcatgcccggctaatttttgtatttttgtagagatgtcggttcaccatgttggccagcgtggtcttgaactcctgacctcagatgatctgccaacctcagatgatttgcccacctcggcctcccgaatgctgggattacaggcatgagccactgcgcccggcctagacaggtttaaattctagtcagctgaatgacctttggcaaattattcattctgtgtttcctcatccataaaacggggataataatatccctatctcatttgtattgaatgagttaatattggtaaaacatttaagaataaagactgcagccaggcacggtggctcacgcctgtaatcccagcactttgggaggccgaggtgggtggatcacttgaggtcagaagtttgagaccagcctggccaacatagtaaaaccctgtctctactaaaaatacaaaaattagccaggtgtggtggcacatgcttgtaatctcagctacttggaaggctgaggagggaggatcgcttgaacccaggaggtggaggctgcagtgagctgagatcacaccgctgctttccagcctgggcaacagagcaagattccatctcaaaaaaaaaagagcaaagtaatagtacctacctcactgggtcaggaagagaagcaacacatgcagagctctaagggagtcttgtatatggtgagcgctaatgtgttcattcagaatttactttaatttaaaaaaaaagttggctgggcgcggtggctcatgcctctaatcccagcactttgggaggctgaggcaggcggatcacaaggtcaggagatcgagaccatcctggctaacacagtgaaacccggtctctactaaagacacaaaaaaattagctgagcgtggcagtgtgcgcctgtagtcccagctgctggggaggctgagacagcagaatggtgtgaacccaggaggcagagcttgcagtgagccaaggttgcgccactgcactccagcctgggcgatagagcaagactcctcaagaagaaaaaaaagttggtccctgaactgaaagaggccacatatcaaggacataagcacgcaaaatcagcaagtgccatacagtaagtactgatctacaacagaaagaaatcaaggcatacctgcagacttaaacgacatactgaagagccacgtccttgttcaaataattccattccaattccccagagaacagaggtggcatgcggtaggattagagtttcactcagctaagacagaggtttgagtccctgctcggcttagctgtgtgatcttgagctcgtgaccaaacttcttacagtcttaggagagttagaaataacaaatgtagattccagagtgattgaaacagagtaggccttcaggaagtcacagttattatttgtataagcctttcagtttagagtaattttagaattatagaaaagttgtgaatatagtacacagagtttccatgctgttattttattttcaacaatattgttattctgattgtgaagagaggtaaacaatttctaaattacaccttaaaaatccatgacaacaaagaatactgtcactctaggaaacttctgatttatgcacttaaacacaccactccgcatcaggtgaactgatttcccaagtttgttaagatgtgttacacagtttaaaggcagacatgactaagaggctaacatgtgtatcacagacctaggaacactttctccatgttgccgtctctaaaaggaacttcagcaggtgcagtgggtgcctcctctcaactcataccacaaacccaggggcttcaaaaattactttccctctaccagggcccttcaaaacacagtatttcctaaccaacagaaaacgaaaaactctgtgacccagacagcccagcctttgaaagcagcaggggtagcaactgctgagcctcaaaagtcagcctctgagtagccacccagaatgcaatgggctggcaaacagtaggggagaaaaacgctggatccaagcctggatcccagtgctcaccggacaatcatttgtcccatttcctcaattatctgtttgtctcctatagctgtctatcataaaggcaatgtgaaaatattattttaaattttacagaatagaaattacggactcagaagaggcatatccagacaataggtagaaaagtagaaaaataacagctattgtcctagaaatcaaatacaatacacactaacatttagatctgcttttaagagctttcaaaaacctcacgttattagacatttttggatagttttaaaagtcttgttctttaacagtaagaaaaatgcatcccctgaattgaagctttagagtatttaaagtgaaaagcttgctaagagataaatgtgcaaaaaaaaaaaaaaagtagtatttgagcattgcagagggatttctcctttctcctgagctgctgctgtaacatctcctctgactcagcacctaagaggcatgatgggaagggagtactataaaaaagccatgcattattaacaagacatttggcatcaaagcagaatgatttggaaaaccggaaaatgtccgcagaataagagaaaggggagctaacagcttaaattatttttggtagtgtcatgccattcaaaattgtccattctaatcttctaagctgtctttttctcccttagttttagctctaattctgatctctttatgtctttcctaccttacattccaaatggttactacttacattctgagtggatttctctgtgttggtttgctcctgtcagttttaaagaactgctgtacacgcattagatccaatgaagacagactgcaacagaactgctctgcagaagcccaagagataccacacataggatgttaacacttactactgcctagaaatcaagagtctgtcttcttaaccctagaataagcaaccaagtgacctaagttcccaattcacagatggcaagccaatggttaaaaaaaaaatacatttactcttacaaccatttttaggaccctagaatttaccatcaaattgtcagtaaaaaatgaagctgggccaggtggagtggctcatgcctgtaacctcagcactttgggagaccgaggcaagaggacctcttgaggccaagggttcttgctatgttgcataggcaacatagcaagaccttgtctctgcccaaaaaaaaaaaaaaaaaaaaaaaagccaagtgtggtggtgcacacctacagccccagagacccacaaggctgaggtggaaggatcccttcagcccagaagttcgaggctgcaatgagctataattatgcctctatactccagcctgggtgacacagcgagaccccatctttaccaaagaaaaaaaaaagaatgaagctggcatatagtccaatggtcagagacaatgacttgagtaactcaaaatccaattctgcttttctggcattatatcaaattaggaaaactattcccttcctttaggccagtagttctcaattaggggtgcttttgcttcccaggggacatttggcagtatctgggggcatttttcgttgtcaccactgcgggagaaaggtgctactggcatctcttgggtaaaggccacagaggctgcaaaacatcctacaaggcacaggacagcctcaacaacaaagcagcatgtcaacagtgccaaggttgagaaactctgccttagacaaatcacttaacttctactgacttttaaattaaccactgacactgttagaaagtacagcagtaatgcataaacgttaagtttatatttgctggttcacatttattggattaataaacatgctgggcgcggtggctcatgcctgtaatcccagcactttgagaggctgaggtgggcggatcataaggtcagtagttcgagaccagcctggccaacatggtgaaaccctgtctctactaaaaatacaaaaattagccgggtgtggtggcaggcgcgtgtaatcccagctactcgggaggctgaggcaggagaattgcttgaactcgggaggcggaggttgcagtgagccaagattgcaccactgcactccagcctgggtaacagagcaagactctgtcctgggaaaaaataaaaaataaaataaaataaacagataatttattttcgattccctataaactgaatatttcttccttagtaaatggagcacagactagcatcaccttttctgcaacataagtaacaatgcacatgtgcaagatttgcataaagtagcctctgcttctggctatgactgagagcctgtggcagaccagagatccctcagagaaacaactccaacagccagagaaaattaaaaaaaaaaaaattttttttttcaaagtctgaagactttggagaactgtggaagctactatgacttgaagagacacaatccggaagggtaaaccctttaggagcaagccaatatgccacaactgctttgcccctcagggaatctgccaatgctaggtgccaggaaggaggctgaggaaacagaaaagcagcctgggaacatgaccagagccactattcacaggcagagaaaccagcagagctcatggtaatgtctcaggcctgaagaaagaaaaatagagacaagggcctaggattcctgtgaaaagaactgagtgttttaccctgaagacattttacaaaatcccaaagatgcacaggtcagaaggctgaaaccaagcagaaagcctctgaatagcacagcaggtttcttcaccaatcccatgtactaagaagacaaagattaaagttcaggacacaccgtgggggacaaagattaaagttcaggacacaccatgggggaagggccccagttcttagccagaactcctgcagggtacttccaaagagtagaggcaaaccaaaaagagatggagcctgaccaaaaccacgcccttgctgtggtcagctcagacaagataaatggaatcagcccccattctatttgcctagcaaatggtgtaagccatctagatattagaaaatcatctagggtcgctacaatttttttatatacaatgcccacttttcaataaaaattaacaggcatgccaaaagataggacaaaatgagtgtcaaggccgggtgcagtggctcacgcctgtaatcccaacactttgggaggccaagccaggcagatcacctaaggtcaggagttcgagaccagcctgaccaacgtggagaaaccccatctctactaaaattacaaaattgccaggcttggtggcgcgtgcctgtaatcccagctactcaggaggctgaggcaggagaattgcttaagtccgggaggcagaggtggcagtgagccgagatcgtgccattccacttcagcctgggtaacaagagtgaaactccatctcaaaaaaaaaaaaaaaaaacagggtgtaatattttaatattgggtaagacagagcaaaaaaagagaatgattgatccaaaagctatgccatcagaaaacatctagactgaaagctggaggagaaggaaggagaatagaaaaatacagatttgtattgagtgctagcctgagaaaatgtctcagcaaaacagtgtttaggtatccattggatgatacatgcagaaataaacacagatgtcacctctttgacaattatacaggatttatgttacttgatttccaagtaacaaagacagcaaaataatcagaaaaaaaatatttagactcaatgagaaagataagagagatccttaacatactgaggatgaagaacctgataattcttagctcactctcttatcaatctcaaagttaaaatgatcacgggagtggtgtgattcaatggatccgtttctgccccgtgggaactacaatttcacagatacaaatttgtaacatcttttttgatatctaatcaccgatgtgaaaatttttaacatttttaaaccgttttattatgaaaaatttcaaatatacagcaaagttgaaaggattttacagtgaactcccatatactcaccatcttgattccactattaacttgcttatcacaaatatatccattaatccatcttactttgtgacctatttccaagtaaactgcggagatcagtatacttcctgctaaacacttcaacatgcatgttaattaattagattttttttcccttcttggtgtaaaagttcatgcaatgaataggtgtgcatttgcggagtttgacaaatgcacatacctgtgtaatctaaatccctatcaagatatgaaacattacaatcactcctgaaaggtttcccaagcccctttccagtcaatccctacccttatttccctctctcagaataaatgtttttttgtttgtttggagacggggtctcgctacgttgcccaggctgtcctggaactcctggcctcaggttctgaggagctaggtctctaggcatacatagcacaagtgtttttgttgttgttatttgtttgtttgtttttgagacagtctccctctgtcacccaggctggagtgcagtggcatgatctcagctttctgcaacctctgcctcctggcctcaagcaattctcctgcctcaatctcccaagtagctgggattagaagcacacaccactacacctggctacttcttttgtatttttagtagagacagggtttcgccatgttggtcaggctggtctcgaactcctgacctcaagtgatctacctacttccgcctcccaaagtgcggggattacaggcatgagccatcatgcctggccacaagtgttatttttaacccacggcactttgaacaatcttcaagtctctggtgtgaagagacagtcttagaaaagtaatgtttaaaagggataaatagccaggcatggtggtgcatgcctgtaatcccagctactcgggaggctgaggcaggagaatcacttgaatctgggaggcggaggttgcagtaagccgagattgaaccattgcactccagcctgggcaacaacagtgaaactctaactcaaaaaaaaaaaggggggggtgacaattatattttaattataaaatagtaaatgaaaccatattcctgaagctaaatttaatacttacaaaaagttgcaaaaaagttatatctgttacatctttaaatgcatataagccatttaaatggtatcaatctaacagctaattttcaatgaaatgtttagtctcaaagaaggcataccgattgatatgttcaacacaagtattcttgtttcctaaaattctatttttatgaattcatggagacacaaaatatcctagagaagaatccttaccctgaaattgcaatttatctataatttatattccttgaatacctgggtttcccttctgcatataaccaaatggaatcctttcttggcaagaatggattgctgcctctactgtgaactgtagttacctggctctaactggcagacagataatttaacgtaaattagcagattatgcctgtgctctggtcctagaatattatttaagagatagcagataagagtggtaaatgatcaaccgggtgtttgctgaaacttcctggagggttaagtaatttattattaatttttgagactagctatagatgggaaaaatgagtcattctgattaaaatgacggtgcggggcaatcagccagctttagacactgctcctatatcaagtacatgccaggccaggagcaggggctcacgcctgtaatcccaacactttgggaggcagaggtggaaggactgcttgagcccaggagtttgagaccagcctgggcaacatagtgaggccctgtctctacaaaaaaaattttaaattagccaggcgtgatggtactacgtaactgtagtcccagctactcaggaggttaaggtgggaggatcgcttgatcctgggaggttcaaggctgcagtgagccatgattgccacactgcactccagcctgagtgacagagtctcacaaaacaaacaaaaaaaaacccacacgccaaaacatgttcttctgcagtatatggtagagtccacattttcttacaggactgaaaacctgacagtcactttgcctctagactacagttttaacatttttagttagtatataaatctgtacatataatgtaagctcaattacgtttttgaaaaattacacatactcccctaaaaaaagatccagaagaaaaagcaccaaaatgttaacagtgtgttatctttgggttatgaggttttagattgtctttattttccttatgcttcgctgtatttcccaaattttatacactgaatgtattatttttaaaatccaaaataaagataccggggaaaaaacaaaaccctaggcagtgactgacctgtaatgatcaccaaatgactgattttatcacactgtgattatgaagctacaatgaatgaatgccctttgtcctgatttatccttgctgccacccaaaggtacatataacctgattctcctggcaacaacacaccttggcatcccacttaccccatgtctgtaaagaggcctcagacagtaattcaaccatttaaaaactatgtcccctacaattatgctttctcactatcttcagagtattctcacctactgttttttttttaatgtattcactgtagtgtgccttataaaaacaataggtatgttgagtgtgctgtttctatttatacataagcctttcactcccatccaaaagaaaacatcccagcctgggcaacaaagtgagagcctgtctctacaaaagaaaaaaaaaaaagtagccaggcatggtggcgcgtgcctgtagtcccaactactcaggaggctgaggcaggaggatcacctgagcccaggaagtcaaggctgcagtgagctatgatcgcatcactgcattccagcctgggtgacagagcgagaccctgtctcaaaaaacaaaacaaaacaaaaacaatagaaaatatcttggtatcaccatatcatcatccaatgccaactttatgaaaattcctgatgtaaactggtgaaaatccttggaataacaactagaatgggactcagttgtagtgctggcattgcctaggaggctgagtatatcctttaaacctttccatgattctgttttcccacctgtaagatacaggggtaagcccaataattttgagtatcctttccactgaaaacctgtcacactgcctctagactacatttaacgtttttagttagtatataaaactgtacatataatgtaagttcaattatgtttttgaaaaattacacacaccaaaaaaaattatccaaaatgttgcgattcttcagatcctgttgtatcttacacagtcatgtgccgcataatgacgtttcagtcaacgactagctgcatatccaatggtgatcctctaagattataatactgtatttttactataccttttctgtttagatatatttagctacacatttacttacctacagtattcagtacagtaccatgctgtagagatttgtagcctacgaataataggctataccatacagccaaggggtgtaataggctataccatctaggttggtgtaagtacactccatgatgttgccacaatgacaaaatagcttaacaacgcatttctcaggatgtatccccatacttatgcaacatatgactgtgtttgtgaattcatcctgaaaacacatctgagattataatctcccaatagtcagaatatcaatcacggtagcaataacactgactgcatatgcttgccaccacagggactttgctaagttcttcactatcaggtagaaactaatatcaattccaatgaagaaactgaagttcgaacagaatggtccagtaactggcccaaagtcaccaaaccagtaagttgcagagcggggacaagagctaagaatcattaggctccacagctcattgcagtttctctctccaaggtgcaggctaattctccttgtcctaaacaacacaacacagtatctctaccttgctgtttctaaaggccctaaggtagatgactaatagggaagctctctacatctgatttctaggagtctaggaattctgagtataaacgtcttcactattcatggttacatatcatcaagaaacaagcttactttcgccaccactttttaagacattttccaaaagcctgctggcagcagtgtgcgcttatgctcaggtgactagctaggccccagaagtttagagaacagtgcaaatgaggttaaggtgccaggtggactccagggcaggtatgcagctttgcataaagaacaactctttgcataaggggtagcctcaggggaggttccccaatcccagaaagtgaccttacaaatgcctacccacaaacagttaatgaagggaacaaaggcacaacaaaattaatctctgcacctggaagataactcaaagtgacaggatggacacctcactttcgataattagccacctcattagatttacaaaaaaataacagaagtgagatgacctgatcaactaagctagcagaagtctaagccactcttccttgaaaagcagacagcttatgtaaacgtactttttattaacaccctaattttcacatttatttccagaaagaagttagaaaaagtatgttcctcatacttcaaagtgccctttctgtatagagaggcgatgtgcctagatgggaaaagaatgggtttacctaggcttcacacctacctaccaccgatttgcgcatctatttttcttttcccaactataacttttgaaagttatagttgggaaaactgtaacttcctcttcctaaatcaaaggcaaatcaaagtctgggcacggtggctcacacatgtaaccccagcactctgggagggcgaggtgggaaggtcacttgagcccaggaatttgagaccagcctaagcaacacagggagacctagtccctacaaaaaaattttttaaaaagtagctactggtcctagctacttgggagggtgaggtgggaggatcacttgggcccaggaggtaaaggctgcaatgaggtgtgatcacaccactgcactccagccttggtgacacagcaaggccctgctgagaagggaaagggaaagggaaaaggaaagggaaagggaaagggaaagggaaagggaaagggaaagggaaggcaagtttgctctaacacaactgataacacctgggaacaatatgcgcataacctgaactctgcctttgcatatgcacaatttcatccacgaggaaaacccagaaaactacacccagctggaaagacagacagatacacacacacacacacacacccctgaagcatctaccagctactcagttcaccaagtgggtgccacacacatctgatgttagaactctcaatgccatttcagagaaccctccttctaccacttcacaataactcaagctgcaaccctgctgatgctcacttctatgagcaaaccacagatttagattttcaaagtgccatatttacagtattccttaactgcttaacatgtgaacacctgcactgttttcattaggttctttttttttttttttggtgatgagtaactaatgcagtttttgcacacctaactccaatttttcataatctctatggcttttattgaacaatctggcatagtgcagtaattttttttttttttagacagacttttgctcatgttgcccaggctggagtggcacaacacacaaccccctacacaatccccagcccctttcagaatgtcttccacggaactggtccctggtgccaaaaaggttggagaccactgctttatatggattaactcattaaccacagggtgaagtgaacctatcatgacagtctgttgtggtttatttttttttttttttgaggtggagtcttgctctgtcgccaagctggagcgcaatggcgcaatctcggctcactgtaacctccacctcccgggttcaagcgattctcctgcctcagcctcccgagtagctgggattacaagcatatgccaccatgcccggctaattttgtatttttagtagagatggggtttcaccacattggccaggctggtcttgaactcccgacctcaggtgtttggcctcccaaagtgctaggattacaggtgtgagccaccgggcccggccagtgtggtcactgttagaaatgcttatgccatgttatagcagaactatttaatataatcacctttgtagaaaagaataaactgcatgacattaatgatattcccattctgtacatacagatacctttctaaagggtgggggtgggaaaagaaaacaacacattgagtttcaatctaatcatttccaacaactcagaagcaaagaaatatgctgagttttcattatgtctaatgcttccatgtgggatcttccaaagggctaagaaagcctggctcagcctagagaatgccacacaaattaactacagatttaactcctttaccgatgcaaaaggcacgctgtgtcacacagctgtgtatgaagaaacaatggaaataatcgcagtaaatgtatatagttaatgtgaccagggtagcccaactctttggtcctgctcaattgatttgacctatgtcataacagactctcaatcattcaaagtttactcactcttgacaaactagagaaaaaataacaatctagagaaaaataattactaagtccaaacaggtttctgagaagagctttattctactttgtggaatccaatcaaagaaagaaaaaaactaattagacatactgttgtaacatttaatgagatttgaaattcatctatttaaatttattaatagtaaaggaatgagattaaatagacttgacatcgaaggggctagaatttcccatgaagttttccacattatcggtaaagacagcaggtatgttttctttacagctttcaagaatcccttgccagaaataatcttatattaagacaggatgtttcgttatagtggggaaaacagaactggccaggaaaagatcttatagcaaagagattgtaaaagattattctagcacaaatacagatttaaattgctgccatcctttttctcccagcccagcaattcctgaggtgcaaaattttcaaatatctgtgtatacaatgacaaggacacaagtgaaaacacttgtgatgaaagggttatgaataaattactgcaatttccttttatcaaccaagttgatttaatggtttaaaaatattgttcaacagaacaaaggtggtaacatttgttagatcctaattaaacgtgattcattctggaatgtttctgatgacacagcttacataaataatctactgggaagtctactcaaaattcacaatgaagagtcggtttttcacacatataatacaacctgaaactatagcttcaatctatgcagatggttttactattttaattatacaactaattaataccaaaattagatcgatgttgtttaatttgtggctactgaggaatgttactattcacaaatcacaaaatctgtgccaaaataagtcttcaaagggatattgttgcctccttacccttctaagctttgcagtgggctttggtcaaagctgacataaacagctaaagaaattaacaacagagtctcagaagacaaggccaggggagccaaaaggacacaggtgctacacacccaggcagttgttgtctgctcccagagcacctgacttcagcagccacagcacctgctcctcaagcgcagcggcgcctttgagggagcacagcctggaaggtttacccttcgcagagacgcttgctcttggacttctggctgtacattctgagggttcaaatgaaggatgggacaatgggaaagcttaaatcctctggaaacgtcactgtgatcaatggcttcaaccctcctctacctcataccagttcactggagctgctaacactaagtttccttctttatccgcccatctctattccagtggagccccgtgattaagggatggcagaggaaggggacatgtccttttttttttttttttaacagaaaaacactcatttagatacctggtttagtaagacatctgaacaacatgaaacccaactatgtaaaagctttaaaaatccaggttatgaattagcctaaacctgtgcttatgttccattctgtttagaggaagggggatggaatccctttcacctttatatttttcatgacaagtccatggtcacatcaaaaattacttttgtctttaacacagttgaaattattaaatgttatctagacctaaccaaatcctatttccttaatgttatattcaggacagtgaaaaaaatactgttttcttttagcaaagtctgacttttaaggctcagtttttacctgattaaataaactgcccctgcttttgaggttagaaaaattacttttgttcatggggtccattatactgtactattaagtttacttttatatgtttggaaatttccagccgggcgcggtggctcatgcctataatcccagctactcgagaggcagaggcaggcagattacctgaagtcaggagttcaagaccagcctggccaacatggcgaaaccccatctctagtaaaaactacaaaaattagccgggcatggtggcacgcacctgtaatcccagatactcgggaggctgaggtgggagaattgcttgaacctggaaagtggaggttgcagtgagccgagacggtggcaccacactccggcctgggggacagagcaaaactccatctcaaaaaaataaaaaaagaaaaaagaaaatttccataataaaatgaaactcttaaggaaaaaactgctttgaacataaagccaacccaaaaagtagctcttacctaaagtgaattttccctagtgccaaatgaaattcaaataaatcccaatcttctaattcacacaaatcttaagatttctaatactttaaaccagaatgaaaaagtcaggtatgccaaattaacaatcgaagagaaaattaatcccacaccaaagccaaaacattgaacttcctcccactctcgcattcacacacacacacaagcatgaaccacacaatgaaggattccagttgccccatccagacaactggacgcacatcacacacctcctagtcatccagggaccatcttggcagcctgtttctcatcactacctgccaccctgtgcctgtgttgtggacgaggaaggcacgggtagtagcctagctttttatttttttaaatctcagcaatagaggcaaggttatttctaccttacatccaagagtatggagcacaagactagctgtttattaataacatgcttattttccacaccaaccacacggttttccaatttcacaaagtaaatacttcctcatccctctttagaaaagatgaaacaatttatcgtagcctaagcaaaaaccacctatcaaagcaaagactggcaagcagattcaagacataaaggtatagcttttactataaatttgaaaccaacaagaaagccattaacctaaatatttttctaatcaaaaatcagaaatgacgttaatagcaacatataagaattactgtatctaccacacttagaatgtactggggtagatgacaatgacaatcagtactgattgccttatgtttatcaactttttcatctacatttcaggtttcagtgcaagacaaaccattaatacattcatgactagccatttcaaagcattattgtatacatactgtacgacacaaagtgcttaattgtaacttaaaaggttaaaacccatcttgaatcctaaatgggcaaaaaaaaaaaaaaaaaaaaaaccccactagtcatttgcccacaaaccaggccccatataaccatcaagcatctgactgcatcggacatgattaatctgaaactgtgctatgaatcatacagcagtcctcccttatcttcaagggatacgttctgaaattccccagtgggtgcctgaaactgcaggtagtaccagatctaaatacattgctttttcctatacacacatacctatggtaaagtttaaattataaattaggcacagtaaaagatgaataacaatgtaaaaggaaaataaacttggggaccccaaacccactaagtcaaagagaaaagtcaaggtaggaacggcatcatgcaaacctacctccctcacaatctgcccaataggaaattccttgtggacctcaacatccttaccctacaaccactctgctgaatttcaccctgacaacgtaaattgacagcttatcttcacaggtataggacaaaggacagaacttaaagtcattcctctgcttacctgagacaaatgcataatctcatcacttcctctgcccggtaagtatattttgtcttatgtaaaaatgcagattcactgagctagatgaatgcataagggactattcctccgctgccccccacccttgcccgccacatgtgaatagctgatcaaagactcaaaagaatgtaaccatttgcctcctatctaccacgccttcctaaaatttctccccctttaaatactgaagccctcaaaatcatcttaggagaaaggcacagaccttgggcctgggtgcatgcccttaaccttggtaaaataaacttctaaataaattgagacctgtctcagatactttttggtttgcaacaaatataaaatggttttacaatttggtttacaacaacaacaacaacaataaaatggaacaattataacaataataaaagtaattaagtaaagttaatttttctgagagagtctcactctgttgcccaggctggagtgatcatggctcactgctgcctcaaactcccaggctcatgcgatcccaagtagctggggctacaggcatgtgccaccacacctggctaatttttatttgtatttttgtagaaacaagttttcccccaggttgcctaggctggtctcaaactcctgggcttaagcgatcctccagcctcggcctcccaaaatgctgggattacaggcatgagccaccacacctggccataagattaaaattcaaaagtattacaaataataaaattaaaataagggtcacttgaacacaagcactgtgacaccacgatgatgatgtgataatccagacgactactaaatgtgtatacagcgtgggtatgctggacaaaggaatgactcacatcccaggcaagacaaagggggacagagcaggatggtgaaagatttcatcacgccactcagaatggtgcacaatttaaaatttgtgaaatgtttatttctggaattttccatttaatattttcagaactcagtgaaaccacagaaagtgaaactctggataagggggtgactaccttattcactatcattcctggcaattaaagaatgttaactccaactgaacaccagatgaattggccctcaattaaacacatctgtccagaaatataaaatcacccaaaactaaaaatttactaaagtgaagcatgctccttagaagacttaaaaaataacagtgatacactgtctgctttgttcatcactgtatccttcaagtctagcacactgtaggggtgttacacagagattaatgaatttagctataagaaaatagcaaaatcaggcaaatgcaaagatgagtttgtaattttttctcttttatcacaggcaccagaacataaaagttttctaagtacccacccctgcctttaatcaccatttttatcactcacatttagataaatacatttgcagttcagctgatatcagaaaaaaaaatatgtatcaaattgtcaaattttactaagtcagagctgtgggagtccagcagcttttacacgttagatttttctatttcctcattcgtcagcatttgacatcattttctgatgttataaaggataacagaaaaaaaaaccctgtgcacacatcacgcccctcctagtcatctagggaccatcttggcagcctgtttctcttcaccacctgccaccctgtgcctgtgttgtggacgaggaaggcacggggaaacagaatattctggtgaataaagcattactaattttcaaagaattagaaggcaaaaacaaacaaaaaaaacacccacaataccaaactgaaagtcatgcctcagggtctttattgtaactacttaatactaaacaccaaaacataaatgatgctgattaatggagatttggggctaagaaaataccaaacaggctaggcgtggtggctcatgcctgtaatcccagcactttgggaagccaagacaggtggatcaggtgttcaagaccagcctgaccaaaatggtgaaaccccatctctaccaaaaataaaaaaattagctgggggtggtggcatgcgcctgtaaccccagctactcaggaggcggagacaggagaatcacttgaacctaggaggcagaggttgcagtgagttgagatcatgccattgcactacagcctgggtgacagtaagattccacctcaaaaaacaacaacaaaaaaaggaaataccaaacaaaatgtgcttttccctatcttcgaaatcatcatgtcttttcattcctgtatggcaaaaaataaatcccgtgtcgcctgccgaatccgaatctaaataaatgaataaagacagagaataataaagaaagaaaacagcttcaaacttaaacacgttagagcaagagaaacaaacaaacaaaaaaaaccatgactcctgctttctcaaaaatcacatcagtagcttataaagaccttcatgggcagaaaaagaatgggcacactgtagggagcaaaaggtaagtgataatatttacaaagtagtgtattttaaaagcataaacaaaaaattaggtaaattgggcctcattaaaaacttttttgtgcatcaaaggacactatcagaagtgaaaagacaacccacagaatagaaaatatttgtaaatcatgtatctgataaaggtttaatattattcagaatccgtaaagaactcctaacaggccgggcatggtggctcatgcctgtaatcccagcactctgggaggcgggggtgggaggatggcttcagtccacgagtttgagaccggcctgggcaacatagggcaatcccatctctacaaataatgtaaaaatcagccgggcttgctggcacgcactggtggtctcagctgcttgggaggctgaggtgagagaactacttgagcctgagaggttgaggctgcagtgagccgtgatagtgccactgcactccagcatgggcaacagagcgagagtccatctcaaaaaacaaaaaaaaaccctaaaaaatagtgattactggccaggcgcggtggctcacgcctgtaatgtcagcactttgggaggctgaggcgggcggatcatgaggtcaggagatcaagaccatcctggctgacacgatgaaaccccgtctctactaaaaatacaaaaaaattagccgggcgtggtggtgggtgcctgtagtcccagctactcgacagtctgaggcaggagaatggcacgaacccgggaggcggagcttgcagtgagaccagatggcgccactgcactccagcctgggcgagactccgtctcaaaaaaaaaaaaaaaaaaaagtgattactgcataacattatgaatgtaatttatgccactaaactgtacacttaattacttaaattactaaaatagatacatggcaaatttcatattttaccaccaaaagaagaaaaatgtacaaagtagatttggaaaaaattaattcagtcacttcaaaatcaggattaattaattcctttccccaaagtaaatgcagtccaacgaccaagaggctggtctgcccagacaatagtttcttctttcatttcattaaatatttaagtacatacaacgtgctgggcaccatcctaggcacaaggaaattacaatccagaaaacttccctctcatgactatatagattatgaggatatgggtcaaatgagcttttctaaaaaagttaaagcattaaatgcttttatttaaaacatacagattcagccgggcatggtggctcaagcctgtaatcccagcactttaggagcccaaggcaggtggatcacctgaggtcaggagttcgagaccagcctggctaacacggcaaagccgcatttctactaaaaaaaaaaaaaatagccaggggtcatggtgctcgcctgtaatcccagctactcaggaggctgaggcagcagtatcacacgaacccaggaagcaggggttgcagtgagccctgatcgcaccactgcactccagcctgggcaactgagtgagactccatctcaggaaaaaaaaaaaaatacagattcaaaataactatatcatgaatcctaaagtcagtctactatcatttttggtctatctggtttgacttccttaggttggcaattctgtcatttttctgaacaggaataaaacatttttttcctttttcaattacataagcaagacacaacacagtatttaggaaaacactattttatgaccttcaccagccaagtctaccaatcagcaaatacacacatcctgatcaggaatacaatttaggcttggttcctgaaagtagaacttaaaatgggataatgagcagctctgtgaggaaaaaataaccctgtctctccatcttcccaagcttatgattgttcaacacagtagaattaagaagaaggtttaaatgtcaattatccatacttttaggactacttgggagggggtggaaaaagttacctctttactgatatttaaatatcctacaactttttaataaaaataatatacagttgtgctcactagcataccctggatccactgacatgtaaaaacacaacattgcggccgggcgcggtggctcacgcctgtaatcccagcactttgggaggccgaggtgggcggatcacgaggtcaggagatcgagaccatcccggctaaaacggtgaaaccccgtctctactaaaaatacaaaaaattagccgggcgtagtggcgggcgcctgtagtcccagctacttgggaggctgaggcaggagaatggcgtgaacccgggaggcggagcttgcagtgagccgagatcccgccactgcactccagcctgggcgacagagcaagactctgtctcaaaaaaaaaacaaaaaaaaacaaaaaaaaaccacaacattgctgtcttacaacctactctttccggtacccaatactccacaatatttttcatctttataattaggctactaaccacctaagagaactgttcataattgatgacagtaatgaaggtgcctcagaaacaatgaacaggttcgcttctgattgctgcaaagtacctgggtagctccgtcacctgcaaaggcagaggaacaatacccagggtctaataattgcttactcaaactaacaaaaggagaaaaaaaaaagaggaagtagagaaggggcagcactctaaattatttaatgtgattcccatgcttgggaaaacactgaattcatgcaaccagcaggagctggaatgctcctcagtataaaaggcaccatataaaaagaattactgaatccaaatgcaatattcattttcatttaacatccaactacctagaggattgaggtaatgagtctggggctctatttcacacttaaaagctgaagtgtgaagccagaggaaaggactggcttagcagatcaaaatgtaaaaggattagcccacaggacaaaaaaaatggtccaaaaaaaggaaaaaatggtcttaacatcccaaagatatttccaaaaattctttctgattttctttcctttgaccaagacagcacaattttccctcccttccttagtgacaatgatttcaaagacagatttccatgtagagacacgaagtctggagttcccaggctaatgtccgaaagcaatggcactgcacagtggggaccttgccattcaccccaaagactgaaactataaagtctgaagattacacacaagcatgtcaccattctcaccgcagcagtctggggaggagatgaagtcaacgggaaatcagaactttaaaagacagtgtctttacttgacaaaatgattccttctttacttcaaaggttcaattcacacatgctcagaatcatgaaacttcagatctgaaagggaccctagaatctgcacaatagtccagtctcctcagttcacagaaaacaggaaaaaaaattcatacctagttattggtaaagtcagacaggagcccaaacctaatctcagtttaatatgagcatgagaccaagagggcacctcctatggttataaataagaatcataaggccgggtgcagtggctcacacctgtaatcccagcactttggaaggccaaggaggacggatcacctgaggtctggagttagagaccagcctggctaacatggtgaaaccccatctctactaaaaatacaaaaaaaaaaaaaaaaattagctgggcatggttgcaggtgcctgtaatcccagctactcaggagggtgaagcagattgagaatcacttgaacccaggaggcggaggttgcagtgagccaagatcgcaccatagaactccagtctgggcaacaagagagcgaaactccatctcaaaaaaaaaaaaaaaatcataaacataaggacctttgtgtcaagctctgtgctaagcccttttatgtgcatattctacttaattctgacaagtagcctgagaaaggtagtatcctctatttgaaaacaaaatgaatctgcccactccaagctgatctgaacccagatctcttttcaaccacattgtatgtgcttcaggaatatcttaataattctcaactttgggcaagttaatgactcaacttgacttatatgatcatctataaattgacagatgtagtcaaaagtttagaattcaaagatctcccataactgataacatgacactcaaatgctgggtacctgggtagctccaggattttaagtggatcttaaaatcccattaatttttcctcacaattttctacaaaacataactcgtgtgcaaaggcaagcatacctttattggctactagaaagtgaagaacaactgcccttttccccacagtgcacataggcctgcctcttctcttcagcccacacccaacctgcttgcttacgattatctgtttgtcttagccagtggtaacctccctttttctctatttctctgacaggcctcagcagcattacattgctcacttcttacgtgctaaggtttttctttgccttatgtgattagatgtgccgaacatacttccaagatctaaaaagcagcaaaatttagggaagcaagaagtcaattgtattctggccttctgctgctttggaatttctgctctctcagagagctctaaagaggcatggcaacacagagcccctccttcctggtgattattatacaaggctcccactggcctgttcagctggggcggggggagttgatgctggaacagaatcatctgccggctaggtatcctggaacagtaattaatactgtttgaatggctgagactatccaaaaccaaccactttctttctactaaagaaaatttcaactccaaacccaagacctggcttccaatatagcaaaaactccacaaagagaacataaaacatcaccaaagtcctggtcaaaagtggtgctgtttacttttgtaacatcaacctgttctccaaacacggcttcctcctaagaagaagggacaacactatactcaaatatgtgcgcaagagtgcatgtggatttggagcaaaaaaaaaaggtgtccttcacgggataaggctctttaattctctgaagtgaagtaacccatatttccccatatgtatttcattctagaaagctcagaaactgagtgtgctgagggattcagagggctttttcatgtcaagaaaaaaaaaaggctattttcagactacacttgaatggggaaaatctgaaattttcatgtggttattaggaaaagttgtatttgattatataaaacatgtatcttctctaaaatcgttgtttggagacagggtctcactctgggtacccagacagagtgcagtggttcaatcatggctcattgcagcctcgacctcccaggctcaggtgatcttctgacctcagcctcccgagtagctgggattacaggcaggcaccacatccaactaatttttttgtatttttagtagagacgaggtttcactatgttgcccaggatcgtcttgaactcctggacacaaggaatccgcccatcttggcttcccagagtgccgggattaaaggcatgagccaccttgcccagccttttttttttttttttgtctaaaatcttaggaatggccgggcacggtggctcacacctctaatcccagcactttgggaggctttggtgggcgtatcatctgaggtcagaagtttgagaccagcctgcctggccaacatggtaaaaccccgtctctactaaaaatacaaaaaaaaaaaaaaaaatagctgggcatggtggcaggcgcctgtaatcccagctacttgggaagctgaggcaggaggatcacttgaacccaggaggcagaggttgcagtgagccaagatcataccactgcactccagcctgggtgacagagcgagagacttcatctcaaaaaatagtaagataaaaataaattaaaatcttaggaccaatgtttatgtagaatgtaaatgaattatcaacattctatatatgaaagcatctcactagctttattgaggtatgatttcttaaaaattctctaaaagattgactaagatgcagttctagtttttcaaagggctttgggattttttgaaagtatcagatcattgaaatcaagtcacttgctcaaggtcattcgatcaaatcaggtaagattagaattactggctcctgccttccaaaagccagccataaatcaaatttctcttggaactaagcaggccaaaaatgtcaaaatcattccccatctcttttcttcagtaatcaaggaaagagaaaaattagtttaaatgtagaacagaatttcaattaataaaatgtcatcggccaggcgcaatggctcatgtctgtaatcccagcactatgggaggccaaggtgggcagaccacgaggtcaggagttcaagaccagcctgaccaacatggtgaaaccccatcaaaaattagccgggtgtggtggcaggtgcccgtaatcccagcaactcaggaggctgaggcaggagaattgcttgaacccaggaggcggaggttgcagtgagctgagattgcgccactgcactctagcctgggcaacagagcgagactccatctcaaaaaaaaaaaaaaaaagtcatcaatgcataaacaattacccctaaccatgcacaggcacctctcttgaaaccgataactgtttcgacaatttgctaaggtcagtaacctctacacaaccttgccatatgatggtaccataaacttattaagattttaaatcagcacctcatatgtatatttataaatagctcgcttctgttatcttttaaaagacctgatcagactggagtacggaagtactctgagctctcggatttttttttaagttaacaggtcataaataagttcaaaagttttctgcagaaccctgaagggaatagggatatttcaacattgcaaataaaacaagtgattaaataaatgagaatcataaaggccagagggtagagggttgaagagaagggacatcacatttttatgcaacattattaccttgctccttatcaaatccaccactttctctctttcactctctcactttctgtcccaaccttctccttttaaattgctgatataaaacactacttccaaaattaacaatacaaacacaactcccggccaggcacggtggctcacgcctgtaatcctagcactttgggagactgaggtgggtggatcacttgaggtcgggagttcgagacgaacctggccaacatggtaaaaccccatctctactaaaaatacaaaaattagccagtggtggcaagcgcctataatcccagctattctggaggctgaagcaggagaatcctttgaacctggggggcagaggttgcagtgagctgagatcacaccatttcactccagcctgggcaaaagagcgaaactccgtctcaaaaaaaaaaaaaaaattccaacgaagtcgtatttttaaaacattaaatggatcaaatggtattattatagtagctgagggcattttatattttttgcaaacacactattaatagtcttatttagtaattttcctcatatccaattttctatgtgagatggtaccccatttcacggatgactctcaagtccaagaaaagtttcctttgctcttagaatacgggtcacccacattaagtggcattagagctcaaaaatactaagttaatggttaggctgaaattttggctgggttacagtatacatggacaattcataacatttatagctacatgatttttcttatttcaaattcaagtctactatttctgaatctcttggagtgatgatatctctagcccttgagcacaatgtagccacagggtatacaaagcaaatcaaaagcaagcactggaaaaagttaaacctagaaggaaatataagtccaataattccactgtgccagaaaacagaattgtcattgggaaatttattaaagtgaactacatgaaactgctgatatacaactgtttttgacctgcaaaaacagaaatttcatatggctcaacctaatgttattttctgttattttctctctcttttttttttttttgtgtgtgtgtgtgtgtatgagacagagtctcactctatcacccaggctggagtgcaatggcgcaatctcggctcacagcaacctctgcctcctgggttcaagtgattctcctgcctcagcctcctgagtagctgggattacaggcacctgccaccacgcccggctaatttttgtatttttagtactgacagggtttcaccatcttggataggctggacttgaactcctgacctcatgatccacccaccttagcctcccaaagtgctgggattacaggtgtgagccaccacacccagccaacctagtattattttctaagctcattttaataactattcaaataaggtcttcataacccaaggaacacaaaacaaccttctatttctccagattgccttaaccttgaaaaaatttgccgccccactgtccaaagctagacattctaaaaatttaagttcaacagagcctgtgcatcatagtgagatcctgtctctacaaaaaactgttttaaaagttagccaggcagggtggcatgtacctggagtcccagctactcaggaggctgagggaggaggatcccttgtgcccaggagatcaaggctgcagtaagctatgagcatcactgcacgacagcctgggcaacagagactctctatcaaaaaaaaaaaaaaaaaattagtaggaagggcaaacagctaaatgtaactactccacatcctttttttattgttcccctttctcacgaacaaaatttccatcctaagtagaattccccttcagaaggcttacattcaaggggatacagtactaatgaaaatgtaagtgctctgcctctttttcagctatcagtgatataggattctaggcatggcagtagcacatcgctttacacaggggttccactgacctaaaaatctactgttgaggaatcttaattaaattgataagttccatttctgttgaagaatctggcttctaacctttctatcaaaagggtgattaccatcccagtgggatatagttttccatttagatatagctgatttatggactcagaccagaagtacctgtcactttcacaaaaggagaaaaaaaggattatggctctaagactgcctctaggtccaaatcccatcttttcacacccatttttattagagtctaatagccaacatgctaatgaactcttttctcagttaattccactaattagttatctcttcttgttctgccagaatcccaacccttttacaatctactcatcaaatccatcaggccacatattatgccttcctagaggaacacttttcgtgatgacactttgtaaacaaggcaatctgatgctgcctgttctatcttcccagatctagttgatagttcaaaacatcaacattaaccacaagtaaaatatgcttaaaaaataatcaggagacgatctcctgctctatctggaaatttctctattcagctagttctgcgttgacaggtcaacagagaatggcactagttattgctacaatcctaaaaggcatttccctacagctaaaccatcaaccctttcctaaaatccatataatccaaaatttttctagcagaatttactctccctgcccctaccccagcagcatcttctgatcatttttcaccataaactgaggtttcctcatagtgatgccaagtcaggcaaacacattccttaagcgttccacctaactcccttcttcctggaagttacatgtaatagctgcctttatttacttatttttaaaactcttcaagcaccaggtacagtggtaagtgcttttaaagaacatgtatctacttccatccttaacactgtatgagattgggactcacattcccattttacagaggagaaatgcaaaggcttagtaacctgcccaaggtcatacagggcagagattggaatccaagtctgacctctgtgtcctccgctcttaaccttcatgctgtctttccttctgatctcttcctgtcctaactggtgccctgtggtcttataaaagactatgcttggggcaggcgggggaggggtgggagggtcagtttctccagagaccgcctttcctttaaaggataagactttgaaaagaaggagtacccattacatctttcctccatgctcccccttctcacctggtaccatttcccaaaggccccaatcatatccccttctctacggacaatttaaacttctcctttgtccgcagagcaggcactatccaatactgaagaaccacaccatctaccctcaaggctaggagagggcagaagtggaagaaagaacacagacagcaccccttccccaggtcttcagttgagaaagaagctgtggctgaaagtctggggggctgggggcaaaggtgacaaggatgtgcccttgtgggtacgcgaggtgggggggggggagatggggaagaggcatgggacgctcaggggattagcaggagattgaatgggggtggacctctgtaaggggaaggggggtgccaccggcaggcagagagatcaggccactgaagaggtgaacgtgagttagggaggaggacctggaggtggatgtaataggggaagtagaggaagaaaggggagggagggggctcacgggagcaggaaacgatggagtcatggggagtgggggaggatggatgggagctagaaggtggggcggcctgggacccgggcacatgggctcggcgaagagcgggcgcgccgcgggggactggggtgcggggaatgccgggaatgggggttcgaggagaccccggggaagggaaggggaagcgggagttctcgagcagaggagcgggaagtgggagttccagcgaggcaagagcgggaagggggttccggagcaaggggcgggcgtgaaggtacagtcgggttcgcgagggtggcgttaggaggggcggggtgggccggaggctggcgcgggagagggatcccgggcgcctgttggggtgcggagggcaggaatgtcctggcgtccccgagagccgggccaggactccggagtcttcggaggaccaggctcagggccgcctcccggccggggccccttagggaggggcggggattccccgggtccctcaaggccagagcggcagccgccgcggtcccaagcccccttcctacctatgccgggcgccacatagacgaagtacagcagcgaggacgagagagaaaagaagaagagcgcggcgagcagcgagcggcgcggcagccgcagcagcccccggcgggcgcgcatgctgcagccaggcggccgctagagagccaggccgggcctgctcccgcagctccccgtccgccgcctcctgggccgccgccgccaccgcctgggcctcggccaccgcctcccgggcctcgcgggccgccactcgccgccgccgccgcctcgccgctcccagccgccggccgtcgcgggccgggccacatgaagcgggcgggggccagagcggccccgagcgggcgcagcggcgggggcggaggcggggcgcacgcgcgggaggcggggccagtgccgccgggcaccgtcgcaaaagacccgcgcgcttgcgctcgccgccgaccctcgctcggcgcccacagcagcccgcatggagtaatcgccaaatggcgacagaccctctcccagtgcggccaccgcccaggctttcggggaatgtctcccaagtgctccgcgctagctcgtcccccatctcgggggccaaggggccatctacaaagtctgactcatctcgttgcccactgcagcagaagagtggggactgcaaggcttgggggttcggcctggtatacaccctcattcattcattcattcattcattcaattcaccatttatttattgaatgccagacacagttgttggcgctgggcatgctacagagaaaaaaaacgataaaaatctctgtctacttgaaacttacattatgtgagagataaaagaaacaaatcagctagtaatatcaggtactggtaacacatatgaatacgataaaacaggaggatgtattgcaggcaggctggagtggtcaaggaaggcctcactgagcagtgacacgaactgagatataaaagggtgagaaagcgccagcttttttgaataagctggggaaaaagcagtcataccagggggaacagcaggtgtaaaggccctgaggtaggaaaagggctgatctgcccccgagttgaatccaaggccaacatggataaaatccagtgaagtagggggggaaatagggatgagcttggagctgtagtcagggatcctactgtatcagaaatagcataatgataacaattgtcaatgtctctagacttctgctgagaaacatggacttcactcatgccatgaaattcccccaccagtcttgagatgtgtgctgttattattactatcatacaaatgaggaaactgaggtttctagatggaaaggcaattcacccaagccttgcagtaagggcttaaatcaaaactggcctgtctcccatgtcaggcccttgacctctaggttgtaactgtctcagcagtctgtatgacctctaattcttatcctgcaggcaaatcggtatcctatccccatcacctgggtatgggaccatatccaaaaaaatgctttcagatcagcatcagctcaaaggacctcagaaggcaatgaacagtcctagaaatttatggcaagaagcagtagcctcaaggagctggactgaggaggccagtgtccctgtgtagacatatctgaaactagggtactgtcttggaatgccagaagcagtggggaggggagaggactttgcagggattctgtgagaatcaacaataattctgatttatattcctaaagtgatttctactttttacagtgtttctttgatcctttaagtggggagtctagagccacactgcccaggttctctgactcccagcttttccattgttagctgtgtgacctcacgcaagttaaactctctgtgcctcggtaaaatggaggaggttattagcaacctcatcaggttgttgcgaggatttaagtaatacatgcaaagtgcacatagtaagagtgcttagctgtcacctaattcaatacccctggagaatggtatggtggaagagaagaggcttaaacgatcaaaaaggaaagcagagaattttgactcagatagatgtgagttcaaatctcggcttggcatctcctggctgtgtgactctgggaaagtcacttacctctctgagcttctctattcatcacctgtgaatcggacccagtgctgcccaccccacggggatgtgatgtggattcgatgaaatagtgcaggtaaggccctggaccagaaatcccagactagccggaatcatctaacttgcaaatagtttttgttggcccacacaatggcccctcccaaccctcgtatctatgaaacattttcaaacatacagaaaagttgaaagaatagtacaagaaacatctgtacactccccacctggatttgatcattgttatcatttttccacatgtatgtatctatattcatatgttgaaaatttttattttttgctaaatatttaaaggtaggctgggcgattacacctgtaatcccagcactttgggaggcaaaggcagatggatcgcttgagctcaggagtttgagatcagtctggccaacatggcaaaactccatttccacaaaaaatacaaaagaattagctgggcgtgatgacgtgtgcctatagtcccagctacttgggaggctgaggtgggaggatctcttaagcccaggaggtggaggttgcagtgagccaagatagcgccactgcactccagcctgggagacagagtgagaccctgactcaaaaaaacaataaaaaaaagtaagttgttgccttactagtacttcatgccttaatacttcagtagcaaatcctaaggaaaattacattatccttcaaaaccacagtaatactaagagaattaacaattataccataacattctgtaacatccagtctgttctggatagacagagaaagagaaaccttcctacatttaaactatgtaccaatgatcagtctctatttctgacctatctgaaataacaaggcatcaaaataaattggttatgttttaggccgggtacagtggctcacgcctgtaaccccaccactttgggaggccgaggcaggcagatcacttgaggtgaagagtttgagaccagcctggccaacaacatgaaaccccatctctactaaaacatacaaaaattagctgggcgtggtggcacgtgcctgtaatcccagctactcgggaggctgaggcaggaggattgcttgaacctgggaggcagaggcagaggttgcagtgagccaaaatcgtgccattgcactccagcctggacaacagagtgagactccacctcaaaaaaaaaatgcaaaatacaaaaattagccaggcacggtgtcaggcagcctgtaatcccagctatttgggaggctgaggcacaagaatcgcttgaactctggaggtggaggttgcaatgagctgagatcataccactgcactccagcctgggcgacagagcaagactccgtctcaaaaataaataaataaactggttatggtttttgtctgtttgtttgtttcagtggagtttcgctcttgttgcccaggctgcagtgcaatggcacattgtctgctcaccgcaaccttcgccttccaggttcaagagattctcctgcctcagcctcccaagtagctgggattacaggcatacgccaccatgcccggctaattttgcatttttagtagagacagggtttcaccatgttggtcagactggtctcgaactcctgacctcaggtaatctgcctgcctcgacctcccaaagtgctgggattacaggcatgagccaccgcctccggcagtttatgtttttaaatggaagaaaaagaagtatgtcaggagtatccagggatccctacctcaaactccttcctccacactactttttcatctccaagttaggtttccaactcactaaagcatgtattcattatatattcatttgactattcagctcctcagacaaactcactgtattctaatctctgctcaaatgttaccgtctcaaaaagacctttcctctaaagtagctttcttctccccatcccagcactctctatccatagccttcctcagcttgatttttctccatagcactttttatcccctgacattctactatacatatacgcgtttacttgttcattttcttctcccagatcagaatgtaaacttcacgagagcagggatttggtttcactctctgctgtatccttgcacctagcacagtgctcagcagccagtaggcgctgaataattgttgaaggacgacaggtgtgcagtgactgtgtgctgggcatggcagatgcaaagatgactaagacattcttgcagcctagtgacatatgagctacaggaaagtgactaactgagggacactgtcataagggcaggactcagcatggctggcagtaggaaaaggtgttctgtgagattctagatggtctttgaagggacattgagacaggtttgctcaaggggcagtgagaagaggcctgcctggttggagcagctagtcctgccaaggaaaagaaagaggtgaggggtgaggctggaggagtgaggcctgaccctgtggctcagcatgggccctggaattagatggatctggctgccagtcttccttcctccctgccctcactctgtcatcttggcaagtcacttcacctctcggaacctccatttccgcatctgtaaaatggagatcagacagttccttctttctaggattgtgcacagattacaaatagtatctctataaagggcctgatatgtaggaagtgctcaatccatgggagccatcactattcttaactttttcctctgagccatagagagcccttgaaggttttagcgcaggggagtggcctaaagaaagggaggtccttggtgaaatctcaggagagcacaggttgggcctcttgtgcttgtcaacacccaattgcaggctagctgaaatcacacacataaagaaaacaatccggcagggcatggtggctcatgcctgtaatcccagcactttggaaggctgagatgggcaggtcacctgaggtcaagagtttgagaccagcctggccaacatggtgaaaccccgtctctactaaaaatacaaaaattagccaggtgtggtggtgggcacctgtaatcccagctactcgggagactgagacaggagaatcacttgaacccaggaggcggaggttgtagtgagctgagatcgtgccactggactccagcctgggcaataaagaacaaaactccgtctcaagaaaaaaaataaaaataaaaaaagccggtgcatccttccctctacttttccttctatcaaataaccatcaatgttgttcagagcagccacccaccagctaagttccagaatgaggaggagatgctcccaactccattttgccaacaatgacacgtagcatgagcaataaataaagcctctgagatataggggctttttttttttgagacaagtcttgctctgttgcccaggctggagtgcagtggcatgatctcaactcattgcaacctctgcctcctgggttcaagtgattctcctgcctcagcctcccaagtagctgggactacaggcgtgcaccaccatgctcagctaattattgtatttttagtagagacagggtttcaccatcttggccatgctggtctccaactcctgacctcaagtgatctgcccgcctcggccgcccaaagtgctggaattataggcatgagccaccgcgccaggccaagggctatttttaatacagaaaacctggcctatccttacttatcataaatataccgttctgcaacttgctttctcctgacattatttttataagatatttccataatgatacatgtggctcaagtttattcattttcactgctgtgtaatattttatcatataacttggcctcaccttttaaaatcctttttcctaatgatgtctatttaagtttgttccaattttttcctcatactggtccataaatccttagctacaattcaaattccaggaaacctaaaaatggaaggctttttataatttatttagcagcaagatctgacctgatttgaacttctttagtggcaaaacctgacctgaatagacagaaagctatttataatcattatgccacttaatgtgaatattcatatgttccactgaggaaatatttagtgtttttttttttgttttgttttgttttgtttttttttttttttttgagacagggtctccctctgtcgcccaggctggagtgcagaggcgcaatcacagctcactgcagcatcaacctcctgggctcaatcgatcctcctgcctcagcctcctgaacagctggtactacaggcatgggccaccataccgagtttagatttttgcttacaggatgaaccagtcctctcaaggggtatgataggagatttcatgaatgcaccatattgtctttcaaaattctaagaatttctttttttttttcttttttgagacggagtttcactctttttgcccaggctggagtgcaatggcctgatctcggctcaccgcaacctccgcctcccagattcaagcaattctcctgcctcagcctcctaagtagctgggattacaggcatggaccaccatgcccggctaattttgcatttttagtagagacagggtttcaccatattggtcaggctggtctctaactcccaacctcaggtgatccacccacctcggcctcccaaagtgctgggattacaggcatgagccaccacgcccggcctcaaaattctaagaatttctaaaattcaaaacacgtttagccccaacggctttggataagggatggtggacaggcacaaacatgactgcgatgtatgcgtgtggcagaatgtattttccaaagatgccctcaacaatatttcctgtcctcatgctcttctagaactttctctaattcctcttcctgtgaatctgggtgggattgtgaatcatctataaccaataaaaagatgaaaatggccaggtatagtggctcatgtctgtcatcccagcactttgggaggctgaggcaggtggatcatctgaggtcaggagttcaagaccaacctggctggcatggtgaaaccccatctctactaaaaatacaaaaattagcccaagcgtggtggtgcatgcctgtaatcccagctacttaggaggctgaggtgagagaatagcttgaacctggcaggtggaggttgcagtgagccgagattctgagattgccctactgcactccagcctgggagacagagtaagtgagactctgtctcaaaaaaaaaaaaaaaaaaaaaaaaaaaaaagatggaaatgatgctgcacaatttgtgaggcaatgcagcttctgacttgatcactgggacactcacctttggagcctggaacccctatgctgtgaagaagcccaggccaagtggagaggccacatacagatgctctggtcagcagccctggcagaggttccagatgacagccagcatcagccaccaagcatgtcagagaacaaggctttagatgtcccaactcccagctgtcaagtcatcctcaccctttaaaccttcccatctaaagccccagacaagctgtcccactgtgccctttccaaaatgataaaatggttattgttttacacaactaaatttgggataatttgttatgctgcagcagtagtaactggagcaacacgcttttttttttttttttttttgagagggagtcttgcttttttacccaggctgaagtgcagtggtgcaatctcagctcactgcaacctttgcctcctggcttcaagtgattctcctgcctcagtctcccaagtagctgagattacaggtgcacgccaccacgcccagctaattttcgtatttttaatagagacagggtttcgtcgtgtcgtccaggcgggtctcgaactcctgacctcaagtgattccccgcagccccctgcctcggcctcccaaagtgttggaattacaggcatgagccactgcaactggctcaacacgcgtctgtatgtaatttgtgcatgtggcaaaaatgtctccaggtcacatggtttacaagagaggatttggtgaacaggtgaggtatgcatatcttctgctttactattttccaaattgttctcaaaaatgcttgtagcaatttatattcctagcagcagtgaaggagggcttcctttatttcctgcttcacccaccgttactgtaatcagaattttccagggtttggtccttctgccaccaatcccctctgaagagagagagtaaggtaaaagttagcaaaggcctccaagagctttgattctgtacaggactatgtctttgctgtcaaaaaaaactgacttatagccaggcgcggtagcatgagcctgtagtcccacctactcggggggctgagacaggaggatcacttgagtccaagagttctgtgttgtagtgtactatgtcatttgggtgtctgcactaagttcggcatcaatacagcaacctcccaggatggggggaccaccaggttgtctaaggagggatgaaccagcccaggttggaaatggagcaggtcaaaactccagtgttgattagttgtgggattgcgcctgtgaatagccaccgcactccagcctaggcaacattatgagaccctgcctctaaaataattaaaaaattaaaaataaaataaaataacccgggcatggtggctcacgcctgtaatcccagcactttgggaggccaaggcgggcagatcacctgaggccaggagttcaagaccagcttggccaatgtggtgaaaccccgtctctacgaaaaatacaaaaattagctgggcgtggtggccggcgcctgtaattccagctactcaggaggctgaggcagaggttgcaatgagctgagatcacaccatcacactctagcctcggcgacaacagtgaaactctgtttcaaaaaataataataataataaaaataaaaaataaaaactgacttatatcccttctctaaattctcctcagtctttcctatcctgtagaggaaggcctaaggcatgacaagattgctcctagtattgcctgatataactcattctctcattcaacagatattagtatttatcaagtactggccgggcatggtggctcacacctgtaatcccagcactttgggaggccaagacaggcagatcacttgaggtcaggagtttgagaccagcctggcctacatggtgaaatcccatctccactaaaaatacaaaaaaatatatatatatatataattagccaggtgtagcggcaggtgccggtaatcccaggtactcgggaggctgaggcatgggaatcgcttgaatctggaaggcagaggttgcagtgagccaaggtcgccccactgcactccagcctgggtgatagagtgagactctgtctcaaaaaaaagaaaaaataataatatttatcaagtaccaaactagatgccagacatttttctagatgctaagagaaaattatgatgataataatgatgatgccactgccatctagggaccaggtatttactgaattttttagtcacccagcatccattcacttgacttctgaaacagccagatttccttctctccttgttttcagtctatgtggttctctgaggttgttaactccatttccatctccagacatgatatgaactagcctggccagtcagaatattatattccttttgcaacagtgattggttcagggctgagcagaccagccagagccaatgatgctaaatgtccagctttctttgtgcctttggagaggccaactttctctttcatgctagacataaacatgacaggttgtgaggccacagcaatggcaactgttttatcaacatgtggaacctgagaatgaaatgagcatataaacagactgatacaaacagcaaagagaaattgagtcctaatgatatagtttgactcttgaattcacctagtcctaacctgcctttctttccttccccagttttgcatctgctgaggtttttacaagtgtgtttttttaattttaattgaatcatagcacacatacagaaaaatacacattgtaacaaaagtatagtttgctaaatttttacaaatggaattacccatttaaccaacattcacatcaagaaataaggacatgatatgatgtatacatgtacatcacatatgtataggtatgtatatgtatatgatatgtgtatgtatatgatgtacatggtctccaatttatgatagtttgacataccactttttgatttcatgatggtgagaaagtgatacatattcagtagaaactggacttcaagaaggccgggcgcagtggctcatgcctgtaatcccagcacttttgcaggccgaggcgggtggatcacttgaggtcaggagtttaagaccagcctggtcaacatggtgaagccccatctctactgaaaatacaaaaaattagccaggcatggtggtgcgcacctgtaatcctagctacttgggaggctgaggcaggagattagcttgaacccaggaggcgaggtagctatgagccgagactgccccactgcactccagcctgggtgagagaacaagacttcatctcacaaaaaaaaaaaaaaagaaagaaactggacttcaagtacctatacaaccactctgtttttcagtttcagtacagtgttcaataaatgatatgagatattcaacacttgattataaaataggcattgtgttaattttacccaactttaggctaatataagtgttccgagcacatttaaggtggactaggctaaactaagatgtttggtaggttaggtggattaatgcattttcaatttacggtattttcagctcacaatgggtttagcaagatgtagctcctctgtatgttgaggaggacctgtgctgttctgtctggctccgtttgctcaccatgtttgtgagattcatgcataccgatgagtgagattgtaaaaccattcattttaattgctgaatagtatcctgttgtgtgaatacaccatagtttactttccagtcaactgctgtcatctggcatttggatcgtttctagttagaggatactaggaataaagctgctataagctccctgggacagtggctctcaggcttgtgaaatactctcttgatgtagtgtattagtcaggcatagctggggggctcacatgatatcagcagccttagtttctctcaatatcttagttctgcttccctctgagttggtttcatcagattcatgtgttcctcctgaccagcttattctcagctgctccaggcttccattccccagcccagtcacttagccaaaaaaaagaaattttataataaagtctcattggtctggcttcattcatatgttcctccccgaaccgatccctgtgattaaagggatggagtgtgctgattggacagaagtggtcacatacccactccccaacctgcccccaccctggagccaggaagcaagatcagcttcctgtgaaccacaaggttgatgtagggaggggtggctccccgaggggaaatcaaagtgcaattattcaagtggaattgttgctgggcaggcaaaaacaacagatatttgtggaccacaccaacttttttttcaatgccttcatgcctttaggtgctctgtttctgctaccaggaaatactgtgttctctttctcctcatcctctaagatccagcttaaatatttttcccatcctaaaacctcccagaatttttggacttgattctggatggatgttctttttttctttctttcttttaagacggagtctcgctctgttgcccaagctggagtgcagtggcgctatctcggctcactgcaacctccgcctcccaggttcaagcaattctgctgcctcagcctcctgagtagctgggattacaggcgcatgccaccatgcctggctaattttttgtatttttactagatacaggatttcgccatgttggccaggctggtctcgaacttctgacctcaggtgatctgcccaccttggcctcccaaagtgctgggattagaaaggcctgagccaccccgcccggcctggatggatgttcttaacctccatttactctccttctgttgaaagaggctcaaaagcttaaaacagcattccacaggctctcttgcagctatgacagtgggaagttaaattctgtcagttagattcatttgcatgagatctggaggatgggagagagggagaggtcgtcttgctggagctgtgtcagctaagggagcggttctgcaggtgggaggagcatgtacagtggagtccactgtgcagtccccacttaggagggtgtgaggtagtaggatggaggccatggtggtggcagggaagcagcagtttggtaaccttgggaacaaggccttgctggaggaaccttgaaatcaaaagcctgaaatggcccctgacttctactcttccagacctcctaatgattttgtaagcacctatatccctgtattaaatcttttttatttattattattattatttaaattatagacacagagtcttatactgttgcccaggctggtctcaaactccgggcttcaagcaatcctcccacttgggcctcccaaaacactgggatcacaggtgtccagcctcaaaattcttttttgggccaggtgcggttgcttccacctgtaatcccagcactttgggaggctaaggtgggtagatcacttgaggccaggagttcgagaccagtctggccaatattgtgaaaccccatctctactaaaaatacaaaaattagccaggcatggtggcccatgcctgtaatcccagctactcgggaggctgaagaaggagaatcgcttgaaactgggaggcagaggtgcagtgagtcaagatcatgccgctgcactccagcctcggtgacagagagaaactgtgtctcaaaaaaatacaataaaataaaagattttttaaaaaagcacttgaatagcacttactctgtgtcaggcactagtctaagcactttattaaaaatttatggaccagacatggtggctcatgcctgtaatcccaactctttgggagggcaaagcaggcagatcacttgaggtcaggagttcaagaccagctcgaacaacatggtgaaaccccatctctactaaaaatacaaaaattagctgagcatggtggtgtgtgtctgaaatcccagctactcgggaggctgacgaaggagaatatcttgaacccgggaggtggaggttgcagtgagctgagatcgcaccactgcactctagcctgggcaacaagagtgaaactccatctcaaaaaaaaaaaaaaaatttacaaccaggcatggtggttcacacctgtaatcccagcactttggcaggccgaggcgggtggatcccctgaggtctggagttcaagaccagcttggcctacatggtgaaaccccacctctactaaaaataaaaaattagttggatgtggtggcacacacctgtattcccagctactccggaggctgaggcaggagaattgcttgaatccaggaggtggatgttgcagtgagccaagatcctgccactgcactctagactgggtgacagagtgagacttcgtctcaaaaaaaaagaaaaaaaaaatttacttaatgggctgggtgtggtggctcctgcctgtaatcccagcactttgggaggtcaaaggggacagatcacgtgaatccaggagttcaagaccagcctggccaacatagccagccaaatttcatctctactaaaaaatacaaaaaattagctgggccgtggtggcatgcgcctgtagtcccagctactcaggaggctgaagcaggagaatggcttgaacctgggaggcaggggttgcagtgagcccagatcgctccattgcactccatcctggtgacacagcgagaccctgtctcaaaacaaaacaatacaaaccactgaacaaacaaaacccttaatctttacaacaacattttgaggtaagtactactgccaccctcatttgcagatgaggaaataaaagtctagaaggattaagaaatttgcccaaggtcacacaactggtttcttataaattatgtaaggttatgggtagatttcataatgccatggggaatgctcttgatgggaacgactgtccttgaaggcaagcactgtctttttttcatatttgcaccgcagtgcctaaattagcaccctaagcacttgataggtgtttggtaaatattggttgaatgaattaatgaaactatttatgaattcagctgagtctgctgtgaaaagaaaaaaaaactaaatattaaaaggaattcagagtatattttcccactagagcacaggtgagcaaagttcttttataaagaggcagagagtaatttttttgtttgtttttttgagaaagagtctcactctgtcacccaggctggagtgcagtcacatgatcactgcagcctggacctcttgggctcaagtgatcctcccaccttagcctcccaagtaactgggacacagacttacaacactatgcctggcaaagattttttatttttttctatagaaacaaggtgtcactatattacccaggctggtctcaaactcctggcctcaagtgatcctcccaccttagcctcccaaagggctgggattagagatagtaaatttttttttttttcgagatggagtctcgctctgttgcccaggctgcagtgcagtggtttgatctcaactcactgtagtctccgcctccagggttcaagcaattctcctgcctcagcctcctgagtagctgggaccaccatgtgccatcacacccagctaatttttgtatttttggtagagatagggtttcaccattttggctagggtggtctccagctcctggcctcaaataatctgcctgtctcagcctccccaagtgctgagattataggcatgagccactgtgcccagccaagacagtaaatattttttattttactggctgtacaatctttggcacagtcaattaattctgctattctatcacaaaggcagccatagccactatgtaaacaaaggagtgtgtttctgttccaataaaactttatttacaaagacaagtagcagaccagatttggctcatggattgtactttgctgaccttgccctataagatgagttttaatatatcaaaagatttactgtagattactgtacttagtaaaatctttttttgctttgttttgaaaaaattattttattttattattttttttgagacagagtctcactctgtctcccaggttggagtgcagtggctcgatcttggctcactgcaatctcggcctgccaggttcaagcgattctcctgcctcagcctcctgagtagctgtgattacaggtgtgtgccaccacgcccggctaatttttgtatttttaggagagacaaggtttcgccatgttggccaggctgatctcgaactcctgacctcaggcgatctgcctgtctcagctttccaaagtgctggaattacaggtgtgagccaccatcccctgccctctccaacatgtaagtagggaatatagagctaacgtttcaatattgtatttcatttatttttatttttttgaaaaacaaatctttattgtctagaaatatatattttaaaaatcccccacaaaagatgctattctctaatttccccatcttctttttctttctttttttttaagacagagtcttcctctgtcacccaggctggagtgcagtagtgtgatctccactgcaaactctgcctcctgggttcaagcgattctcctgccttagcctcttgagtagctggaattacaggcatgtgccaccacacccggctaatttttgtatttttgtagagatggggtttcaccttgttggccaagctggtcttgaactcctgacctcaagtgattcacccgcctcagcctcccaatcatttctccatcttcttcctcttcttccacacctctgatataaaggacattattacaccttattaaaacttcacccagatgtccagacaatgctccatctatgtattcttctgtatttgcaagctgcatgttcatgtagccatctacagataccaggtagccctagtactccattccccgcttaagtttcaccatccttggctttcctgttactccactgaggaaagatctgggattgagacataaactcatcatcgtaaccacaggcaaatgctatgggcaaatgctgcaggccgctgaccaggctgaccaggctactgactacagcagctaccacaggtcctgagccactgagcatcaggagaaaactatgttcaagattttatagtaagaaatgtatttggtaacattccatgattttatgccatagaaggctcagccaacattccatgattccacatagaagggggtttagctaacattccttaagtctgtacagatgagggtgctctgtagacattccataacgataagcaaaaaggttctgcaaacattcaatgattttatacatggacagatgttctgcaaacggttcaaaattcatgctacaagaaaggattctagccaggcgcggtggctcacacccgtattcccagcactttgggaggctgaggcggtcagatcacctgaggtcaggagtttgcgaccagtctggccaacatggtgaaaccctgtcttcactaaaaatacaaaaaatagccggccatggtgatgggaacctgtaatcccagcgacttgggaggctgaggcatgataatcacttgaacccgggaggtggagattgcagtgaaccaagatcgcgccactgtactccagtgagggtgacagagcgagactccatctcaagaaaagaaaagaaaggactctgtaaacattccatgattctgtatacatgtgggtgttcctcaaaaacagttcataatttgattttttaattttattatttttatttatttttttgagatggagtctcactctgccagcccggctggagtgcagtggcacgatcttgactcactgcaacctctgcctctcaggttcaagcgattctcctgcctcaacctcccaagtagctgggattacaggcatgggccaccacgcctggctaatttttgtattttttgtagagaagaggtttcaccatgttggccaggctggtctcaaactcctgacctcacgtgatctgcccgccctggcctcccaaagttctgggattacaggcgtgagccactgctcccggccgacagttcataattccatatacaagaaggaaaacttatttgttctgacaccctgaaattctgtacacaggaagtgctctgtaaacatttatgatttcattgctatgaataggctttatagatattacataattctaatagatagaaatgggctatatagaacttcttgattttatgcttttgtacacagttggtgattctatagccgaagagcactcttcaaacaattaatgattctacctaaaggagggtacaggtttccctgaacctacctagaacaaagggtactctgtaaagattccataatactaaacataggcaactctgcctgctgttaatgacactacagatagaagggtattctgtaaatattccttgatttcatggcccagtgaggtggtttatgcctgtaatcccagccatttgggaggccgaggtgggtggatcgcctgagctcaggagtttgagaccagcctgggcaatatggtgaaaccccatctctactaaaaatacaaaaattagccaggtgtggtggtggtgaaaccccatctctactaaaaatacaaaaattagccaggtgggcgcctgtaatcccagctgcctgggatggtgagacagtagaatcgtttgaacctgggaggcaaaggttgcagcgagccgagaccgcgccattgcactccagcctgggagacaagagcgaaactcagtctcaaaaataaataaataaataaaaatacaaaaattagctgggcaggatggcacacacctgtaatcccagcttcaaaggagtctgaggcaagagaattgctggaacccaagaggaagagattgcagtgagctaagattgagccactgcactccagcctggtcgacagagtgagactgtctcaaaaaaaaaaaaaaaaaaggatgatgaagctgtctacataaggatgtagaaaagtctctaagatacagtgttaggttaaaaagtaattgtggggccggtcgcggtggctcacacctgtaatcccagcactttgggaggccaaggcaggtggatcacaaggtcaggagttcgagaccatcctgccgaacacggtgaaacttcatttctactaaaaatgcaaaaaaattacccgggcctggtggtgggcgcctgtagtcccagttacttgggaggctgaggcaggagaatggcgtgaacctgggaggcagagcttgcagtgagctgagattgcgccactgcactccagcctgggtgacagagtgagactccatctcaaaaaaaaaaaaaaaaaaaagtaattgtgtatctatataaaattgaatatatatatacatatacatatggagttggatcacaaggtcaggagattgagatcatcctgcccaacatggtgaaattctgtctctactaaaaacacaaaaattacccgcatgtggtggcgcatgcccatagtctcagctactcgggagactgaggcaggagaatcgcttgaacctgggaggcggaggctgcagtgagccgagattgcgccactgcactccagcctggtgacagagcgagactctgtctcaaaaaaagaaaataaataaaaacaaataaattaatttattaaattaaataaatgcagtgtcagggtctatataatttttttatttttttatttttttatttttgagacagtcttgctctgttgtcaggctggagtgcagtcacgggattttggcttactgcaacttctgcctcctgggttcaagtgattctcctgcctcagcctcccaagtagctgagactacaggtgtgtaccaccatgctcagaaaatttttgtatttttagtagggacggggtttcaccatgttggccaggctggtcttgaacttctagcctcaagagatccgcctgcctcggcctcccgaaatgctgggattacaggcatgagccacctttttttttttttggcttttaaataaaagcccgccaggcttttttttttttttttggcttttaaataaaaagagacaggatcccaatatgtcgcccaggctggagtgcagtggagaatccagttttaaagagagcattcaagcaagaagctgtgaatggccactcggaaacacagactccagagaagtggggtgagaactcaaaagttaaaagttagggtcttgcttaggtaggaagaaaacaaagaaatttaacaggattatgacttgttttttaaaagagatggggtctcactctgttgcccaggctggaatgtagtggtgtgatcaggactcactgcagcttcaaactcctgggctcaagccatcctcccatctcagcctcctaagtggctgggattacaggcatgaaccactgaacctgccttcattacattttctatacaaggctggtttatgagctacaacaatttaattagttatggtttgtttttatttcctttctagaaatacacttaaagagtgtatttgacattccatctcaagacagtatgatgatagtcatgaagtctttgtgtgagaaaggtaagagggaagttattatacaatgaagatgaacagtgaagaggaaaggggtcttctctggtgccctttagtcatttacaatattttctttctttcttttttttttttgaaacggagtctcgctgtgtcgccaggctggagtcagtggtacaatctcagctcactgcaacctctgcaggattctctgaggcaggagaatcgggttcaagcgattctcctgcctcagcctcctgagtagctgggactacaggcgcacgctaccacacccagctaatttttgtatttttagtagagacagggtttcaccatgttggccaggatggtctcatctcttgacctcgtgatccgcccgccttggcctcccagagtgctgggattacaggcgtgagccattgtgcccggccgtttacaatactttctaaaacaatgtaggtagagaagagggctaattataatcaaacaaacaaaggtaacgcctgcctaggttacagctgagtaggttcagaagacttgtgtcccacaatcacattcccttaaggcttgaaatattttaaagtctcaacagctcagattttgaaatacttattttcacacttccctgcttaaaagtttctcaaggaccactgcgcctggcccagatggttgtattcttttgagtttctgattggcctctccaaaggagccaaagagatatgcatttatctcagtgagcagaggggtgactttgaatagaatgggaggcaggttggccctaagcagttcccagcttgacttttccctttagcttagggatctgggggccctaagatttattttcctttcacagcatcatagccaaaagtggaaaaaagttactgggtgcagtggctcatacctgtaattccagcactttaggaggccgaggtgggtggatcacttgaggtcaggagatcgagaccagcctggccaacatggtgaaaccccgtctctactaaaaatacaaaaaaattagccaggggtggtggcaggcgcctgtaatcccagctacttgggaggctgaggcacaagaatcacttgaatccgggaggcggaggttgcagtgagctgagctgagatcctgtcactgcacttcagcctggatgacagcgagattccgtgtcaaaaaaaaaaaaaaaaaaaaaaaaagctggtggcggggagcggggagaggaaggtgagaacaatcgaaataccatcaactgatgaatggataaacaaaatatagtataggcatacaatggaaaattagccaaaaataaaataaaataaaataaaataaaagatgaggcggggcttggtggctcattcctgtaattctaccactttgggaagctgagacaggaggatcactcagcccaggagtttgagaccatccagggcaacatggtgagatatcatctctacaaaaaaattttttttaattagccaggtgtagtggtgtgcacctatggtctcagctactcaggaggctgaagtgggaggatcatttgagcaggggaggttgaggctgcagtgagcctcgattgcaccattgcactccagcctgggcaacagagtgagtccttgtctcaaaagaggaaaatgaagaatgatgtactgaaagaagtatgctacatgctacaatgtgcatgaacctttttttttttttgagacagggtcttactcttaggctcaagtgatcctcctccctcagccttctgagtagctggggttacaggcatctacctcggcataagcgggcattaatctttttactttatttttatttttgagacagggtctcactctgtcacccatgctggagtgaagtggcacaatcatggctcactgcagcctccaactgttagccccaagacatcttcctgcttctgtcccccacgtacctaggaccacaggtgcatgccactatgcccagctatttaaaaattgttttgtagagatgaggttttactatgttgcccaggctggtcttgaactcctgggctcaagtgatcctccccacttggcctcccaaaatgctgggattacaggcatgagtcactgtgactggccaggcatccatcttgaaaacattatgctaaataagagaagccagacacaaaaggccacatactgtatgattctatttctaggaaatgtacagaataggcaaatctattatagatgattagttgtctaagactgagagcatggggagagatggggaatgactgctaaatggtatggggcttcttaagggggtgatgaaaatgttctaaaattgattgtggtgtggttgcacaactctgtgaatatactaaaaaccattagattgaatatttatttatttatttagagacagagtctcgctctgttgccagactggagtgcagtggcacaatctcagctcaccgtcacctccgcctcccgggttcaagtgattctcctgactcagcctcctgagtagctgggattacaggtgtgcgccaccatgcctggctaatttttgtatttttagtagagatggagtttcaccatgttggccaggctggtcttgaactcctgacctccggtgatctgcccacctcagtctcccaaagtgctggggttacaggatgagccaccgcatccggcagattgaatactttaaatggaaaaatcgtatcgcatgtaaattatatttcaataaagctgttacatatacgtatattttttaatccaataaaaagtcttggcggggcgcggtggctggcctgtaatcccagcacttttggaggctgaggcgggcggatcacgaggtcaggggatcaagaccatcctgctgatttacacggtgaaaccccgtctctactaaaaatgcaaaaaattagccgggcgtggtggcgggcgcctgtagtcccagctactcgggaggctgaggcaggagtatggcgtgaacccgggaggcgcagcttgcagtgagccgagatcgcgccactgcactccagcctgggcgacagagtgagactccgtctcaaaaaaaaaaaaaaatctccttcccacttttgttctccattgaaccagttcccaacactagctgctccttgccatgcacacacacacacacacacacacacacacacacagagctaactactattgttagtttcttgtgtttctccagtttttatgtgcataaaatataaacatagattcttttcccccatgctcttacacaagaatagcataatactgttctgccctttcttttttcatttaatatttcagtgcgttacacttgccttattctttttatttaattaattaatttattttctgtagggacagggagtcttgctatgtggcccaggctggtctccaactcttggtctcaagagatcctcccgccttggcctcccaaagtgctgagactataggtgtgtaccattgtacccagcctgattctctctctctctctttttttttttcctgttcttttcttttgagagggggcagggtctcactttgttacccaggctggagtgcagtggcacaatctcggctcactgcaacctttgcctctcagattcaagtgattctcctgcctcacctaccctagtagctgagattacaggcgtgtgccaccacccctggctaatttttgtttttttggtagagaagcggttttgtcatgttgaccagcctcgtctcgaactcctagcctcaagtgattcacctgccttagcctctcaaaatgctggggttacaggtgtgagccactgtgcccactgattctttttaatagccacataatattcagttttatgaataaactataattagtttattcttctaacagaaatttggttgtttctaatctttctaccttaacacagtgttgcaatatatatacattattttgcacatgggcaggtgtgtctgtaggattaatgactagaaatggactttctgggtcaaaaggtatgtctttgtaatgatgatagagaccttgctcccaagggtgctgtaccagtttacatgctcaccagcaacatgggagggtgcttgatctttgccagcacaacagagtgagcgtcacatagtttcacttgcatttcttcttctgtgataattcaagcatcttttaatatatgtaagagccgtttgtatttttttggtcatttcctttgccattttccactgggtgtgtacttttctatttctagaaagaatatgctttatgtattaggaagatacagccctttctatatgagttgacatttttcctggcttgtcatttgtgttttgactttgtttgtggtactttttgtccctggactttaatcatttaaaaattttttcttatttatgtatttatttgaaacaggatctcattctgtcatccaggctggagtagagtggtgccatcatagcttgctgctgcctcaaacttctgggctcaagtgatcctcctgtctcagcctctggagtagctgggaccacaggtgcatcccaccatacccggctatgtccctggactttaagcttcttggctatctacgctccgtcttatctattcccttgaactccccctatctccatttcatctgctcactcattgtcttcatcttttcaggctgctatatcaaaataccataagctgggtggattttaaacaacagaggtttatttttcactgttctgaatgcagggaagtccaagatcaaagcactggcagattcagtgtctggtgacggcttgatttctggttcatggatgatatcttctcgctgtgtcctcacatggttgaggaggggaaggcagctctctggggcctcttttatatgtggcactaatcccatttttgtgggttccaccctcatgacctaaacccttcccaaggccgcacttcctaataccaccccattggtgattaagtttcaatatatgaatttggtaggggagacataaacattcagattttagcatttctcccctggctccccaaaagtcatgtccttcttgcatgcaaaatatattcattccatcccaatagcccccaaagtcttaaaccataatatcagcccacgcttgtaatcccagcagtttgggaggcaaaggtgggtgaatcatttgaggtcaggagttcaaggccagcctgaccaacatggtccaaccccgtctctataaaaatacaaaaaaattagctgggcatggtggcacaggcctgtaatctcagctactcaggaggctgaggtgaaaggatcgcttgaacccgggaggtagaggttgcagtgagccaagatcacgccactccactgcagcctggactacagagcgagactccatctcaaaacataaaataaaataaagataagatacaggtgagactcaagatacgattcatcctgaagcaaactgctctctagccgtgaacctgtgaactaccaaaatacatcaatgggatgggcataggacagacattcccattccgaaaaggagaagtaggaaggaggaaaggggtgacagatctgaagcaagtccaaaaccttacgtctcaggaacaatctttgactcaaggctctgccctccaggcccactgggggctgtgccctgacttccggacccactgggatggaggtcctgcctccacagtttggctgggcagcagtttgacccccaaggctctgagtgttctgttcccacggctttgctgagtgcagcctatgccacagttctcatggattggagtaatgtgcctgtggctgtcccagcctggcatcacgctctggtggtgcaaccagtctggagtctcagggtggccccacctctgcaggcaccccacccccatggctccactcggcactgcccttgtgggggctctccacagaggccctgctgctgccttgcttctctgcctaggccctgaggccttctgggggcatccttagaaacttaggtggaggcagccacgtccccacagctttgctgggcacagtacaccccaaaccagggcccactggagcggcatctgggatggccgaggaggtagaaatggagtgtggggagcagagtcgagaggcagtggtagccaaagtcccacaggccctggtggcccctcctttgaaattgctctgtcctctgggccctggcacaatgggcctatcacgggaggagcagctccagtcatctctgaaatgtctttggggtccttcttttttttttttctagatggagtctcgttctattgcccaggctggagtgcagtggcacaattgtggctcactgcaacctccacctcccaggttcaagagattctcctgcctcagcctccggagtagctgggattacaggcacgcaccaccacgcctggctaatttttgtatttttagtagagacggggtttcaccatgatggtcagactggtttcaaactcctgacctcaagtgatctgcccacctcagcctcctaaagtgctaggattacaggcgtgagccatggcacccggccttggggtccttctttcattctcttggacaacagatcctggtttctgttgagatggctgatccatactaatctccttatcaaatgtttccttggccacacctttgttctctcactctctttctctctctttctttttttttttgagagagggtcttgctgtgttgtccagactggagtgcagtggtgtgtttatggctctctacagccttgacttcccaagctcaagtgatcctcccacctcagcccctcaagtagctaggactataggcacatgccagcctgctatttttttttatttgttttagaaacagggtattgctatattgcccagacttgcctcaaactccctgccacaagctatcctccttccttggcctcccaaagtgtgggattatagccctgtgctgccacacccagctgttctgtcttatataggctttctgtttttttccaatatgggtaggctttgagttctacctttttgattaacaattccatttttttttttttttttttttggtgagatagaatctcgctctgttgcccaggctggagtgcagtggcacaatcttggctcactacaacctccgcctcccaggttcaagcaattctcctgcctcagtctcccaagtagctgggattacaggtgcctgccaccacgcccagctaatgttttgtatttttagtacagacagggttttgcaatattggccaggctggtttccaactcctgacctcaggtgatccacttgcctcagcctcccaaagtgctgggattacaggcgtgagccaccggtgcctggccaacaattccatctttaagtcatttctctctcacttcattttactataagtagtcaagagaacccaggctgcaccctcaactctttacttagaaatagcttcaggccaggcacggtggctcacgcctatagtcacttgaagtcaggagtttgagaccagcctggccaacatggcgaaatttcatctctactagaaatacaaaaattatttgggcacaatggcacacgcctgtaatcccagctacaagggaggctgaggcatgagaatagcttgaacccaggaggcaggggttgcagtgagcaaagattgtgcaactgcactccagcttgggtgacagagccagactccaacttgaaaaataaaataaaaagaaatggcttaagctacatgtctacttttgttgctcacaagttcttccacaaaatagtgggtcataaacacaattcaggcaagttctttgccactttataacaagaattgcctttcctcccgttttgagtaacatattcctcatttctctctgagacctcatcaaaatgacctttcttatccatattttcaccaacattctatttatgaccacttaggtcttctttgagaagatcggggttctcgctacagctcttttctccctccctccctcccatcctcctttccttccttccttccctccctccctctctccctctctccctgtctctctctctgtctctctttctctctttctttcttcagagtttcactctatcgcccaggctggagtgcagtggcatgatcttagctcactgcaaactctgcctcccacactcaaactatcctctcgcctcagcctcctgagtagctgggactgtgggtgcacaccaacacgcctggctaatttttgtattttttgtagtaacagagtttcaccatgttgcccaggctggtcctaaactcctgggctcaagtgatctgcctgccttggcctcccaaggtgctgggattacaggcatgagccaccactcccagccccatacatgttctttctttgttcaaaatccttccagccagacgtggtggctcacacctataatcccagctctttgagaggccgaggccagaggatcacttgaggctaggagttcgagaccagtgtgggtaatgtagcaagaccctgtctctacaaaaaattaaaaaaattaaaattaaaaaacataagaagcaaataaactcttccatagctccccattgccctcaggaaaaaatccaaaccgcctgacacgcctcccagcccctgcataaagcaggtctgcccacctctcccactcttcctctgccattttccgctcagtttctttcttacgaacaccaccacactggtttcctttgagtccctgaatgaggcacgcttgctcacgctgtgtgttacatctttccctcccctcaccttcccactctcttagactaactatacctacacacactcctgggatcagctcagacctcacctccagggagcttccctggaggaggccgcagctccagcaagggagcaaaggagcagggagggggccagcttggcaggagtgggatgagacagtggaaggatgagatcggagggcacggcagagcaagtgatcatggaaggccttgtcaatggatcacagtgagacttcggcttttcatgctgagtgaggtggaagccacaggaagattttcagcagagaaacagggtctgattcaggattcttctggcatctgagaagcggctgggaagaagcaggaagaccccaacactctcaatcagaattaatctccacttagtctgtgtacccagggcacatgaatatactgctttaaacaagcaaacgccttggtttcttctgtctaatgttttagtttcctgtacgcagcaggtgctgaagcatagtgattaagactgagggctatgcagcccagcctttctgaactccttccacaggtctgtcgcaaggattaaatgaattaatctgcataaagggtgcccagagcactgtcagtgctcaaggaatattagccattattaggaagtgtctgtctgcactgctataacatgacttttttttttttttgagacagagtttcactcttgttgcccaggctgttgctcaggagtgcaatggcacgatctcggctcactgcaacctccgcctcccgggttcaaacgattcttctgtctcagcctgccgagtaggtgggattacaggcatgtgccaccatgcccagctaattttgtatttttagtagagatggggtttctccacgttggttaggctggtctcgaactcctgacctcaggtgatccaccctcctcggcctcccaaagtgctgggattacagttgtgagccaccacgccccatgactttctaaggaatgctgtattgctttaagccaggttcacggaagcagccctcaggcagtttgctggagatcgaagcctctgctggctgcctaggtctcttcctcctgctccttcttctcctctttccctctggattgttggattcttgcaacaggttcctgcagaatcttgccattttaacacttccaaagaatgccaatgatccgtgggtttcctggacaggtagagaaactcacagaagcatccagccgcaggacgacagggctgatggccttggagcctttgtctaatgcatattgcagataaagaaacgggggcccagaaaggttaagccacttggcatcaggcacacaaggcaagagcagaactgggtaggaattcaggtttcctctctccagtcctggggtatgtttttttccttttatgtacttttttttctcttttttctttttctaaagacagtcttactctgttgcccaggctggagtgaggtggctccatctcagctcactgcaaccttcgcctcccaggttcaaataagtctcctgcctcagcctcctgagtagctgggaatacaggcatgtgccaccacaactggctaatttttatatttttagtagagacagagttttgccatgttggccaggctggtctcaaactcctgacctcaagtgatccctctgcctcagcctcccaaagtgctgggattataggcatgagccaccgcagctggcactccttttatatagttttaaaagtacataaggagtaaaagtatgcaaggtaaggagggccaggcgcagtggctcatgcctgtaatcccagtactttgggaggccaaggtgggtagatcacgagatcaggagttcgagaccatcctggccaatatggtgaaacctcatctctaccaaaaataaaaaacaaaattagccgggtgtggtggcacacgcctgtattcccagctattcaggcagctgaggcagaagaatcacttgaacctgggatcacaccctgggatcggcagtgagccgagatcgcaccactgcattccagcctgggtaacagagcaagactccgtctcaaaaaaagaaaaaaaaaaaaagtaaggaggtctcatctttaaaaaaaatgcacgtaagtgaaaaaaattgtctttaatgatcaccctgtgccatctgccaacattctctatccatatccgctgctctgtttttttttttttttttgccaaagcacttatttccacttgatatatcagccactggaatgggaacacccagaaggcatggatatatgcagagtgtggtctcagtgctaaggacagtgcctggcacagagtaaatgttcaataaatatgtgtttaaaagaataaataatacagccagtcatggtggctcatgcctgtaatcccagcactttgggaggctgaggtgggaggattgcttgagctgaagagtttgagaacagcctgggtaacatagcaagaccctgtctctatctcaaaaataaataaataaataaagccctgcaatccttgttcctcccctatgccaacataattgctgttatcaatttggctttgctattcttctagaccagtaccatccaatagaaggctctgcagcgatgcatagatcctatatctgcactgtttaatccacccaccactagctgcgctggaaatgggcctgatgccattgaggaactaaactttacattttatttagttgtaattcatttgcatttaaatgtaaacagccacacgtggctggtgacaagcatatcaactgttctagacattttttttctgggcatttgcatatgtatatgtcatcaggggctattttgcgtttttgttttacgtacattttcatgctccatgtagccttctgctacttacttttttgcattgagcaacactacattttggaaggcttttcatatcaggccatatagatctgcctcattctttttacttgctgcacagaagtgcatagtatagatgtgccataatttgtttagccattctctatcgggagacatttacttatttacttacttacttttctcttttttcgaaaaatagagatttgttgtgggggagggcggggttttgctatttttgcccaggctggtctcgaactcttggcctcaagtaattctcttgccttggcctcccaaagcggtgggattacagatgtgagccaccacaactggccaatattattattattattgatttttttttttttttagagatagagtctcgtggccgggcatggtagctcgcgcctgtaatcccagcactttgggaggccaaggtgggcagatcacttgaggtcaggagtttgagaccagcctggccaacatggcaaaactccgtctctactaaaaatacaaaaattagccaggtgtggtggcgcctgtaatctcagctactcgggaggctgaggcaggagaatcgcttgaatctgggaggcagaggttgcagtgagctgagatcgtgccattgcactctagcctaggcaacagaatgagactccatgtcaaaaaaagaaaaacaaaggctgggcgtggtggctcacgcctgtaatcccagcactttcagaggccgaggtgggcagatcacctgaggtcaggagtttgagaccagcctggctaacatggtgaaacgctgtttctactaaaaatacaaaaaattagctgggcgtggtggcacacgcctgtagtcccagctactcgagaggctaaggcaggagaatcgcttgaaccctggaggcggaggttgcagtgagccgagatcacaccattgcactccagcttgggcaacaagagcgaaattccatctcaaaaacaaaaaacaaaaacaagagacatagggtctcactctgtcacagactggagtacagtggcttgaaaatagctcactgtaatcttgaattcctggactcaagggatcctcccacctcagcctcctgagtaactaggactacaggtacacagcactgtgctggttgatttttaaattttttgtagagatggagtctcactatgttgcccaagctcgtcctgaacacctggcctcaagggtcatttagatggttttcaatttgtctctattaaaaatagacctgcaacaaatgttactgttcataccttcttgggcacgtgcatgaccttttctctctgatgagtacgaataacaatagttctttatttctttctttctctttctctctctctctctctcttttctttttttgacagagtctcattctgacacccagactggagtgcaatggcgcgatctcggctcactgcaacctccacttcccaagttcaagcaattctcctgcctcagcctcccaagtaaatgggatttcaggcgcctgccaccatacccagctaatttttttgtatttttagtagagacagggtttcgccacgttggccaagctggtttcaaactcttgaccttaggtaatccacctgcctcagcctcccaaagtgctgggattacaggcatgagccaccgtgcccgacttttttttttttttttttcagcatcttgctctgtcacccagatgggagttcagtggcgcgatctctgcccactgcaacctccttttcctgggttcaagcaattatcctgcctcaggcttccaagtagttgagattacgagcatacaccaccatactcagctaatatttgtatttttattagtgacggggtttcaccatgtttgtgaacaggctggtctcgaattcctgacctcaagtgatctgcttgccttggcctcccaaagtgctgggattacaggtgtgagccaccactcctggcccaataacaatagttcttattttagtaataataataattgcttctacttactgagcccttattgcctgagccgaagcattgctctaagccctttacttgtattaaatgatgtaattatttttacgagctgggcacaatggctcatgcctgtagtcccagctactagggaggctgaggtgggaagatttcttgagcccagaacttggaggctgcagtgagctataagctatgatcatgccaccatactccagcctgggcaacagaacaagaccttgtctctcttttatttttttctcttttgagacagggtctcactctgtcacccaaactggagtgcagtggggcgatcttggctcactgcaacctctgcctcctgggctcgagggatcctcccaccttagccttccaagtagctgggaccacaggcacacaccatcatgcccagctaatttttgtatttagccatgagcctccatgcccggcaagaccttgtctcttaaaaaaaatttattatgttgaataagagaggttttattattatttccatagtacagatgcagaatctgagcctcagttttagaaatttgcccaaaattacataaccagtaaatgacagagctgagatgtgaactcaaacatccacttcttgagtctgaatatccattttctgttttcctagctcttaccaagctagcctgctgagggactatgctagtgtccacacaggcatgggtccttcacccacagagccgcactgccaccccagggatcactttccaggtttgaggccctgggcccctggatctagggtaagacatgcatccctggagccttggaactgggcagagctgaagtttcggtccatcttggaagcactaaactacagacatgccctgtgtcttgtcccatccccctattattaagtcctgagtcttcctccctggctggtgatgtgctgagagtgataagaagataacagcaagacagacagagtgagagcgacaggctgacttacgtaacctggtggaaagtgatacaggcagattcgctgatgggaaacaaacagaaagggagtcaggcagagcttcctggaatccaggtctaggagctgccaaaaacaggcctcctctcttaggaacaattgaatgtcactgcagtaaccgaacactgctggccagagaggcctcctgcccacagcctcacagagcggcctgtgtgagccaggacaggctccagaggaaaaaagggcctggcaaggtgccctgtgaggctatctgaggagacattgcagttcctcaccctggatgggcctccaccagcacagggctgcgagttgaaggccagggaattcccagggcgagtcccaggcacagaggctgtgagctaggagggctctaacctggggttaagccctgaactcagaagccgggctcctaggctcttatcctagcttttttctgctgtgtgaccctgggcatggcataacctctctgagacctctctctctcagtcttctcattggtagaaagggaataaatatgtgatagtagataaaaataggactcgtagaaaggggataaaaatgttataagaatcaaataagccaggggcttgacaaaccttttaggtaaatagccatataatatagattttaggctttgtcggcagtacagtctctgccacaactattcaactctgctgttgtacagcacacaaaaacaacaacaacaaaaaaccaaatgactatgcccacgtgccaataaaactttatttctgggtactgaaacttgaattttacataattttcatgtgtcacaaaatattctttttttttttaaatttgtatttatttacttgtttttatttatttgtttatttgagatagagtctcgctctgttgcctaggctggagtgcagtggcacattcttggttcactgcaacctctgcttcctgggttcaagtgattcttctgcctcagcctccccagtagctgggattacaggtgtgcaccgccatgcccggctaatttttatatttttaatagagacagggtctcgctatgttagccaggcgggtctcgaactcctggtctcaagtgatctgctcacctcagcctcccagagggttgggattacaggtgtgagccactgcgcctggcctccagccatcatattttatctaatgttccattcggagacatgtagattgtctctagtttttctttctttcttttttttcttcttttttttttttttttttttttttttgagacggagtctccctctgtcgcccaggctggagtgcagtggcgccatctcagctcactgcaagctccacctcccgggttcacgccattctcctgcctcagcctcccgagtagctgggactacaggtgcccgccaccacacccagctaatttttttgtgtgtgtttttagtagagatggggtttcaccatgttagctaggatggtctcaatctcctgacctcgtgatccacctgcctcggcctcccaaagtgctgggattacaggcgtgagccactgcgcccggccctagttttgcatgctcagggctgtgaaacacatcctcagctattcttgtctgcttgtttcttaaacacctagacctggaatttgcagggggaaaagcataaacctggggcctccaatgcatgttacttaggcaggtggttgtgcattggattgctcttgttcctgggcaggacagatagtggctaaaagccaggctttgaagtcctgtagagcagagttcaaatcccagctcagtatttactggctgggtaatctttggcaggtcacttcaccagtttgagcctccatttcctcatttgtaaaatcctgccttcattggtcctcatctcacttctgactctaaaccaccatatcccaagatggggctgattagaatgacttcctcatggaagttacaattattgaaattgtaatcgcttgatgaatggaagttcccacttcttttatcccaggcagtttctcaaaagcaaaaggaaaaggaactaaggccaaaatctgggaacctacaaaatcactgggaatgaaacagaagtgtgggcattagaatggaggctcaatatcccagtccaagatctatggatctggtggaaaataacccactaaaactggctccaactataataaaagggggaggctgggctcggtggttcagcctgtgatcctagcactttgggaggccaaggcgtgcaggttgcttgagcccaggagtttgagaccagtctgggcaacatggcgaaaccctgtctctacaaaaatacaaaaaattagctgggtgtggtggtgagtgcctgtagtcctagctactgggaggctgaggtgggaggatcacctgagcccagggagtttgaggcttcagtgagccatgattgtgccactgttctctgttctccagcctgggtaacagaatgagaccctgtctcaaaaaaaaaaaaaaaaaaaaaaaaaaagaggaaaaaagaaagaaaaaaaaggggaaattcaccataagaagtatcagtcaggagtgtttctgctgttgcagaaacccaactaaatttggttgaagcatgaggagaatcaacttttatttttggtcacttaattgaaaacatcaggacaagtgccagcttccagcacagctggacccaagggccaacatgtggctccagggactctccctccgtttccagtgctgcactccagcttttgctgtgtccccactcctgggtcaagatggcctctcagcaaccgcagagccaggcaattctgtcttttcacggatgagaacagaaagtcccagaaggaagtctcactgggtctagcctggtcacatgcccatttctaaaccaatcgctgtgactgggccagcctagagctaggcagagctggcccccacggacagaaaggaggagacccgtagctcccgggagaatgcaggtgctgtttccagaaggggcatcaaggccagaaaggcaaagacaacaggtgtctattatgccacctggctgtactttttgtgagaaccgctgttatcacatgaaacacaagggcaggaagtgcagtggcctcacacatttcttaaatgagcacctgaaaggccaccaggaattgtggcagccaaatcctggtctctctatgactctgcccacaggtttcctcatctctgcttctctcttttccctctccctgtcttcttccctgagcccatgagcaaacccgactgccccatagcacctgacagcacaaccccttcctttaagcaacagcccacaagactcaccacattctcaagacagagaatctgatcacctcaaccagtcaggtgcccgtctttgtgcagtcaattctggctggagggcagggttgagtagcttgtacgcgtggtttcatggggtagttgcacctgtttcaaagagagatgggtcaccacaaactgggcagaaaccacacgatatgtccatgatgctctgcagctgaatgaagttatctacaaagaaactgaagccaaggccaggcagaagtcaggcctgaagctaagaatttgtttccccaagacaggaacattcctgcatctggaggctgaggctgcttggacagagaagtgcatccagctgccaaggtgaagctctgaaggggcctgtccatgagagcagggccaagaacgcctaagcccaccagtaagatgcaagaacacctgtgcgaaataataataatgatcatagctgggtgtggtgcctgacagctgtaatcccagcactcagggagacagaggcaggaggatcacttgagcccaggagtttgagaccagcctgggcaacctggcaaccccttccccacaccccttgtctccacaaaaacgacaaaaaatttttaaaatgataataatataaaatagcactaataataaatgttattcagtgctgctgaccaggtatcactctagacacttaaatgaacagcatttttgcttttttgtttctttgtttttgagacagagcctcactctgtcccccaggctggagtgcagtggcaccatcttggcttattgcaaactctgtctcctgggttcaagtgattttcatgtctcagcctccggagcagctgggattacaagcgtgtgccaccacgcccagctaattttttgtatttttagtggagacgggggtttcaccatgttggtcaggctggtctcaaacttctggcctcaaagtgatccacccgtctcagcctcccgaagtgctgggattacaggcgttagccactgtgcctgacctaaatgcgcagcatttttaagcctaatgatacagtcagatgggtatttattatcctcatttacagaacatatattgaatgagtgagcattaactgatctttcaccttattaattcacttagtcattcactcactcaatggataaacaattaatgaatgccaactatatgccaaataccatgtgtgctgggtgttgggacacaagcagtcctgtctttgtgaatgttacagtaaaatgttggaggctctgaagggtgagtggtcattaattagacggttagactaataagaggggaagggaaaggcattccaggtagaaggaactccatgtgctaaggcactgtgggggaagggcatgtgtggggtgggagcaatgcctgttgactgatggtgtgccagagaggcagagagccacgcagtttacacctgctggctcactgacccttaccacagtcctgtgagatagctactgctattaatatcattttgtagatgaggaaatcgaggcacagagaaggtaagtaactttcccaaggacacacagcaccattagcagtgaaagagcagcagttataacccaggcctgtgaccagaattctgaacatctctaatctttaagtaaaggaaggcaggagaaattggtccatttggggcaggtgtgttttctgggaaccttccagcactattttcacttgcagctgtagccacaggctacatagatgatttccagaatggaggggaagaagagtgcacccagcctttcctggccacaggcaggaatccttttagccagttattaatgctcagccacaggagatgccgcagtgagacacacagaggagccagaccagggagaggcagcaagaaagacagcattgatcctggaggtatacatttaggagagagaacctgtcagaacagaaagagcttggacttgggaccaggccaacctcagcccaaatggcagccctgctacccaccagctctgtgaccttaagtaagtttcctcttagtctccagttctttattcaagcagagtaaaagtatgcttcccgcctccctcccacctccatcctgtagccaacagtcccccctccccagaggcaggcactatgactagtttcatgcatcatcttccgggtaaattgtagagagatagatggatgaatagaagtatatatgtgtgtgtataatatagtacacacatatatgcaaatattgtaactattgggatgctttgactaagtacaaaaaaacctacagatgcaagatttacttattaagaactgtggagataataaatgcctaatttctgtgtccaactgctcattaatgtctagtaagaatctcaaatttaacatggttaagattaaacttttattgttattattattattttgagacagagcctcactccgctgccctggagtgcagtggtgcaatcttggcttactgcagcatcaacttcccaggctcaagcaatcctcccacctcagcctcctgggactgcaggtgcacaccaccacgcctgtctaataaaattaaactttatgattcctcaccctccaaacctgtttctcccttactaaatacctggttactcaagccaaaaatacactgaaataattctggatttttctctctttcactcactttttttggggggtgctggggtgcagtggcgccacctcagctcactgaaacctccacctcctgggttcaaggagattcttgcgcaccagccactggagtagctgattacaagtgtgtgccaccatgcccaggttttttttttttggttttttttttttttggtatttttagtagagacagggtttcgccatgttggccaggctggtctcgaactcctcacctgaagtcatccacttgccttggcctaccaaagtgctaggattacaggcatgagccaccacgcctggcctttcactcactttttacatctgattcatcacatagtcctgtccagcttttctgaaaatctagagatagatccaccattaagtgaatgaagcaaagctgagatcagggctcttcaattgcacagccccttccaaatctagcaatatgttcacacagtcatgtgtttctgcaacatctgcaaaggtaagtattttagctgcaactggttagacaaggtctctccagctccccaacgttgcctgcctgggaatgtgcatcgggtggcatttggggagctatgggcagggatcagctaaggggaagatgagttagggaatccattaaatttgggtttagtggatgtaatcttttttttgttttttaatagaggtgggggtctcactgtgttgcccaggctagacttgggctcctgggctcgagtgatcctcccacctcaggctcctgagtagctgggactacaggtgtgcaccactgcacgcagctttagcgggatgtagtcttgtagctcacgatcttttcggtgaataaggaaagtattgcttgttgtcctggcagagaaatggcttccaggatactccttctgcccatgctactgactcacccagtatcaagacacaaaagtctggcacggtggctcatacctgtaatttcagcactttgggaggccaaggcaggaagattgattgagcctaggagttccagactagtctgggcaacatagtgaaaccctatctcttcaaaaaaaaaaaaattgttttagctagcctggagtggtggtggtgtgttcctgtagtcccagctattagggaggctgaggtgggaggatcacttgagcccaggaggtcaagactacagtgagccatgattgcaccactgcactccatcctgggcaacagagaagccctgtctcaaattaaaaaataaaaataaaaaaacaggcacaaaagtgactgggcacagtggctcacgcctgtaatcccagcactttgggaggccgaggcgggcagatcacgaggtcaggagatcgagaccatcctggctaacatggtgaaaccctgtctctactaaaaatacaaaaaaattatctgggcgtggtggcgggtgcctgtagtcccagctactcgggaggctgaggcaggagaatgacgtgaacccgggaggcggagcttgcagtgagccgagatcgtgccactgcactccagcctgggcagcacagcaagactccatctcaaaaaaaaaaaaaaaaaaaagacacaaagttatagtactaaggatgccagagcaggaagagagaaggaatctgaatccttagtgatagcattgcttccctaaatgaaccaactgtgaaactgttctacatccagactcctcataggtaaattatacatttgcgggttgggtattgttttatatttgcagccaaaagcatcccaacagatacaacaatatatgcttccatgcctctaaagttaacctggaaggagatatacaagactggtaatgctgaatgcctctgtggagggggacaggtagcagaggggaatgggagggagacctatttaattcagatttttttgtgtgtgcttgaattttgtttctctggggccaactttcaccatttcaaaaagtagatagtaaaacttcaaagtatgtggaacacttgggaacttttttttttctttgggacagaatcttgctctgttgcccaggctggagtacagtggcacagtctcggctcactgcaatcttcttgtcccaggttcaagtgattcttgtgcctcagccttccaaatagctgagattacaggcatgcaccaccacgactgattaatttttcgtaattttagtagagatgtgatttcgccatgttgccaggcttgtctcaacctcttaagctctggtgatccatccgcctcagccttccaaagtgctgggattacaggtgtgagccacggtgcccagccaggtttttcatttcttttaagcgcatgaaagaagtacatttaatctggcaaggctggctcttgctgaagtggtctcggagaggccattggaacaacaaagaaagaaatgtcattggcaagttcagatactaaagggttggaaagtgatctggcactcagcatcctgcagcttgagggacatttggagttcttcctgcctgcttcccactgctgagcaattcccagcccagcctgatatttcaaatgatttccaggaaggggaacctggcaccagctgtacccccttgaagttcttgtgactgtcttcttcaaatgcatccgcctgcttcttcttcaaaagacaagagaaaatgctgctggcgagctaagagacttcaaagatggttttgtcatgtgttttttgagtcaagaggctaagtttctgagaggaggagagatttttttcaaggacacatacagttaattggtgacaggactccagtgtccacttagctaggctccttcttgctcctgttctgcccagggtccttagttcttccaggctgttccacccagtaggcctcccaggttctcaaagtgatagcacagggagatctcctggggaaaaaaatgaccttgacatccatggtctgtgagtctggggaaggctgcattctatagcagcctcctggagatttacagagcatgttggcagattaagggttctgcagagtcctgcataaagaaaactacttaaaaaaaaattcctggccaggcacggtggctcacgcctgtaatcccagcacgttgggaggctgaggcgggtggatcacttgagatcaggagttcaagaccagactggccaacatggtgaaaccccatctctactaaaaatacaaaaaattagccgggcgtggtgatgcgtgcctgtaatcccagtgactcgggaggctgaggcaggagaatcacttgaacccaggaggcagaagtggcagtgagccgagatcacacaactgcactccagcctggtcttgctgtgtcacaaaaacagagtcttgctctgtcccaaaaacaaaaacaaaaacaaattcctcccaggtcaggatatcaatagtactcacctcgtagtgttgtcatgaagattagtatcacgaggctacaaccatttatcggatatcagagtttcaaaatttacactaaatgggttcaataagattatgtataacctcaggacaggtcaggatttccttccaaatgagtgctggcatcagacttttgagaaacagttcatttcatagccttttttgttttgttttgtttttcagagatgtttctagttgtcattatgggctttttttttttttttctgatgcctgtcttcctcctgcagtatgatagccttttttgattttagaattgtggttaaaggaatgaggacttgtaatgaagataatagctaatatttattgagcatttttgtgaaacccggcaatgttccaagtgcctcacatcaatgaacttattgaatccacagagcaactgcacgtgacagatagtgtggtaaaccctgtcgggcaaatgagcaaactgaggcgtagggggactaagtaacgcactcaagcagcagagctgggagtaaatgagacaatatgtatgaattgtttatcacaatgcctagcacataatcaacaatccatataaacattagctattatcctcattaatgatgggagaatcatgactaatcttttttattttttgtttttcagacaggatcttgctctgtcaccaggctggagtacagtggtgcaatcatggctcactgcagcctcaatctcttgggctcaagcaatcctcctagctcagtccccaagcagctaggacaggtgtgtgccaccacactcagctaagtttaaaaatctttgtagagatgaggttttgccatgttgcccagactggtcttgaactcctaggttcaagcaatcctcccgcctcagcctcccaaagtattgggattacaggcgtgagccaccacgtctggccttgactaacttttatcttctttgcacccatgtagaatttctaattttactataataaaaatattctgggctgtgtgtggtaactcatgcctgtaatcccggcactttggaaggccaaggtgggcggatcacttgaggtcaggagttcaagaccaggctggccaacttagcaaaaccccatctctactaaaaatacaaaaattagccaggcatggtggcacatgcctgtagtcctagctacttgggaggctgaggcatggggaggcagaggttgcaatgagctgagatcatgccactgtactcctgtgatggagtgagactctgtctaaaaaaaaaaaaaaaaaaaaaaaattatatgtgggggaaaatgtttttcaaaagattagacaatttctgaattgagcctaatatctcaatatctctcagtctctcttctcactccatcaggtctgatgctggtctgggcagaaatggatttgtcacctcaaagatgacttccttgggcacaactaggccagacgctgggtaccttgtggtggccctggaggggtacagcttcaagaaagaacttgccgatcccctgcaaagaatgcagttagccaacagccttcggcctcagcacatttgagatctgccttaactttcaagccaaggctagctcttcctgagcaggctccagcgaagaacctgcatggagggactaggacccgaccagttctgcccaacatggggctcccctaacaaacagtctttgttctggagctcccaaactgagttgacaaagcctctgtcagccctgcattgccgtctgaggctcccctgctgagtgctgctttcacccacttttgtctttcacaggcatgacactcctccctctcgtcctactagctccactttaccatctgcttcccagaggactggaactgacatgctgcctttactaccccgcaaccattctcaccccacctccacatatgcctgcccaaataatcttgattttgggctcagctactagatcgaaatcccttcatctttggagagtgggttgctccccagccccagcagataaatcatgatctgtcttaagtagacccagtaagtcctttctgttctacaggaattggtccaggatgggtgcctggtccgccttttagccaatgagaggtcaggggaaatctggggcttcactttactaataacatagaccttcaggtagttaaagccttctgccctgccccttcccttccattttgatcagtgtcctgtgatcaaatgatgtgaggcactgcagcagctgttttgggcaatgagtttgaggacaaaagccaactgctgaagatgacagagcagaaagatgagaagagcctgagtcctgaagaacacccccgagcccctgcaatgactctggagctgctgacctccacatgttttgctataaaaaaaaagattgcatttcttctttgctcaagccaccatgaatcaggcatgctgtgactggccgctgaaaatatggtaacgcatgcagtcacattccccatgttctattctccagattaccttcaaacaactgaaggtacaggactcagagttcccgttgaggtatttgaactattttcctggaagggaaatattcaaaaagtcctctcagccccgggcacagtggcttacactgtggattacaaaaggacttttaaggactcataggattacaaaatcctgtaatcccagcactttggtgggcaggtcacctgagatcaggagttcaagaccagcctggccaaaatggtgaaatcccgtctgtactaaaattataaaaattaccgagtgtggaggtgcatgcctgtaattccagctactggggaggctgaggcaggagaatcacttgaacccgggaggccgaggttgcagtgagctgagatcacaccattgcactctagcctgggcaacagagtgagactgcatctaaaaaaaaaaaccaaaaaaattatctcatttccaacttgccaacacctgtgataatgtaaaccaaaaatgaaattctaagcccctcaactgactgaatgaatccccatcttcaccaaggtgatcccaaagaaaacctgaaaaactagttcaggccatgatgggaaggaaggtcagatatgcctcttcgcctcttcatactttcctccctttggagtttaggcacaactggtcagcattcatattaaaatacagatcatcatagggcgggcatggtggctcacgcctgtaatcccagcactttgggaggccgaggcaggcagatcacttgaagtcaggagtttgagaccagcctggccaacatggtgaaaccccgtctctaccaaaaatacaaaaattagccaggcatggtggcaggcgcctgtaatcccagctacttgggaggctgaggcaggagaattgcttgaacctgggaggtggaggttgcagtgagctgagttcgctccactgcaatccagcctgggtgacagagcgagactccatctcaaaaaacaaaacaaaacacaaaaaaccagatcatcagatggacaaaacagactctttgtgcaataagataccaaattccaacctgaccctgtatgtgatgtagagcataacagtgacagataacaggccctaaggaaagtcaaagtattttaccccaagatatatttatttgacatattttggagtgaccctgcaaagcccactctttgccttctgtagcgaatccccttcctgttccaggtcttttcctgatccaggagagaattaaactaagagtctaacaccttttgaggtctaataagagaaatctaccatctatcctgtctgaagctgggtgcttagaggcttcatctacataaacaagaaccttggcttccacaactctcttaccttaactcaagcatttctttttctttcttttttttttttttgagttgggttctcaccctgtcacctaggctggagtgcagtggtgtgatctcagctcactgaaacctctgcctcccaggttcaagccatcctcctgactccacctcctgatagctgggagcacaggtgcgtaccaccacgctgggctaatttttggtagagtcaggggtctctccatgttgcccagtctggcctgggactcctaggctcaagcgatccacccgtcttggcctcctaaagtgctgggattataggtgtgagccaccgcacctgacctcaaacatttctttatgctgacttcaactcctcaggcaatgcttcactctttcaatcaattgccaataaggaaatcttcgaatccacctatgccctggaagtccctctgcttccatctttgagatgtcctgccttttgaggctgaaccaatgtatacatttcatgtattgctttatgtctttgtttgtgacttccatctctctaaaatgtataaaaccaaactgcaacctgaccaccttgtgcatatgtcctcaggaccccctgaggctgtgtcacgggccatgatcactcatatttgggtcagaataaacttcttcaaatattttacggagtttggcttttttcctcaacaatacttacctctcccttgcttcaaaccctcccatggctccccagtactttttcagttttttttttgagacagagttttgctctttttgtccaggctggagtgtcgtggtgcgatctccgctcactgcaacctctgcctcctgggttcaagtgattctcctacctcagcctcctgagtagctgggattacaggcacccgccaccacatccggctaatttttgtatttttagtagagacggagtttcaccatgttggccaggctagtcttgaactcctgacctcaggtgatccacccgccttggcctcccaaagtgctgggattacaggcgtgagtcactgtgcccggccacccccccagtactcttaagacagagtttgaactcctcactgataaagacctgcaagatctggcacctcctggtcccctgccatcacccatgacccttcctacttcatacttgttccccagccagactgaactacttttaattgcctaatattattactagaaaggggtcctgatccagaccacaagaaagaattctctcacaagaaagaattcgggatgagtccacagagtaaagcaaaagcaagtttactaagaaagtaaaggaataaaggccgggcgcggtggctcatgcctgtaatcccagcactttgggaggttgaggcagggggatcacctgaggttaggagttcaagaccagcctggctaaaatggcgaaaccccatctctactaaaaatacaaaaaattagctgggcctggttgtgcgcccatgtcatcccagctactcaggaggctgaggtatcggaattgcctgaacccaggaggccgaggttgccatgagccaagatcgcaccactgcactccagcctgggcgacagagtgagactccatctcaaaaaaaaaaaaaaaaaagtaagtaaaagaataaaagaatggctattctgtaggcagagcagcagcatgggctgcttgactgagtgtatttatggatacttcctaattatgtgctaaacaaggggtgaatttttcatgagttttccagggcagggttggggagctcctggaagtgagggtttctcttctttttagatcatatagggtagcttctggacattgtcatgactctggtgggagtgtcttttcgcatgctaattagtgtataatgagcagtgaggacaaccagaggtcgattttgttatcatcttggtttggatggcttttgacctgcttctttactacctcttgttttgtcagcagggtctcaatgacctgtatcttgtgataggaatcctgctggcctcttatctcaacctgtgagaaagaatgcctaacctcctgggaatgaagcccgttgggtctcatccacattttacccagcccctattccagatggagtcgctctggttctaacacctctgacaatatcctatattacctccagacatttgcgtatgctaatttctctccctcctcccccatttcatgtggctgtctcctccttcgtcaggtctcaactcaaatgttttctcccccaagaggccttccttgatttcttttctttttttttttttgagatggagtctcgctctatcacccaggctggagtgtagtggtgcgatcttggctcactgcaacctccgtctcctggattcaaacgattcagcctcttgagtagctgagattacaggcacccacaaacatgcccagataatttttgtatttttagttgagacggggtttcaccatgttgtccagctggtctcaacctcctgagctcaagtgatctgcccgccttggcctcccattagtgctgggattacaggcatgagtcaccgcacccaaccaccttccttgatttctagactggattctgaaaccccttagggctcccattgcacctttgtgtttaccctgttgaaacagctatcaaactggattatggttgtctgttttcaggactgctctctgctctctcctatactacctctagctttttttctttttcagatgtagttttgctctgtcacccaggctggagcgcagtggcactatctcggctcactgcaacctccgcctcccagattcaagcaattctcttgcctcagcctcccaagtagctgggactacaggcgcacaccaccatgccggctaacttttgtatttttagtagagactgggtttcaacctgttggccaggctggtctcaaactcttgacctcaggtgacccaaccgcttcagcctcccaaagtgctgggattacaggcgtgagccgctgcgcctgacctctagctcttttttctaactgttggcctgctttccaaaagttggcttaggcccatgactaggttcttggctgtagactcacaaagaactgcttcccagagacctctccaccacctcccttttgcagttttactccagcagttggatgtgcttggtttctcaatctgactggtgactcttctctgatcctctaagtccttttttgagacagtcttgctctttcccctgcaaattccaggtctaggcgtttttctttttctttctttctttctttttttttttttgagaaggagtcttgctctgtcgcccaggctggagtgcagtggtgcggtctgactctctgaaggctccatctcctgggttcaagtgattctcctgcctcagcctctcgagtagctgggattacaggcatgtgccaccatacccagctaattttgtatttttagtcaagatggggtttctccacgttggttagtctggtctcgaactcccaacctcaggtgatccgctcgcctcggcctccgaaagtgctgggattacaggtgtgatccaccgtgcctggcggacttttgttccttttagaagaaaataaaaaaagaatctagaggattggtgaaaaataaaagatgacagtagaactctaggaagtgttttttttttttttttttgagacggagtctcgctctgtctcccaggctggagtgcagtggcgcgatctcggctcaccgcaagctccgcctcccgggttttacgccattctcctgcctcagcctcccaagtagctgggactacaggctaatttttctgtatttttagtagagatggggtttcaccatattagccaggatggtctcgaactcctgaccttgtgatccgcctgcctcggcctcccaaagtgctgggattataggcatgagccaccgcgcccagcagaaaggagttttaatcattacttaatccaacgcttttttgttgttgttgaagagggaaaactgaaacgggaatgtaatttgctcaggatcacatggccaagttgtagaatcaggctgcactctagcctgggtgacagagggggactccatctaaaaaaaaaaaaaaagaaaagaaagaaaaagaaattattaacaatgaaaattaaaacaaataaaaatgttagaggctagactccacagccagcccactctcaccctctgtgttgtaaatgcttgcatgaggcttcaggcaactttcaggctgacaaggaagtttacagcacccagtccatagtgggagtgtcctaatgaatgatgaatgcttatcgtgtgcaacagctttttcttcttcttcttttaaatgacctggtcagcaggaagtagcaagagcttcttaatagaacattgggggagccaactgggagaggctcaaccagcttttgaaccagaataatctccgagaagtcacagccttttttgtttggccctcttttcctgcaggtggattcattagagtactttgagttgcatgtaaggagactgggtcaagagggccttaagtgactagagtacttagtattatctcaggtaacaatacaccaataggtggactgtttcagggttggctatttcagcgtctcagttctggggtattggattagcttgttactggacaggggtcccaatccagaccacaagagagggttcttggatctcgcgcaagaataaattcagggtgagtccgcatagtaaagtgaaagcaagtttattaggaaaataaaggaataaagaatggctactccatagacagagcagtcctcagagtgcctggttgcccatttttatggttatttcttgatcatatgctaaacaaggggtggattattcatgcctctccttttagaccatatagggtaactttctgaggttgccatggcttttgtaaactgtcagggcactggtgggagtatagcagtgaggatgaccagaggtcactctcatcgccttcttggttttggtgggttttggcaggcttctttactgcaatctgttttatcagcaaggtctttatgacctgtatcttgtgctgacctcctgtctcatcctatgacttagaatgcctaagtgcctgagaacatatcccagtaggtctcagccttatttcatacagcccctactcaagacggagttgctctggttcaaatgcctctaagcttctcaaggattcctcatggtctcaaaatggctgctacaacttcaaatgtcacattctagcacagcaatgtccaaaggctggaagaatatgtgtgagagagaaaagaagttgggaggtgggaaagtttctctcttttaatagaaaggaacttccttcccagaaaccctcagcagacctccaccaatgcctcaactgccaggactgcttccaatgcttactccaagactgtcaacaggatttccatggctggctcagaccaatcagaattaatttcctgcacatgacatgttgtgttttgttccaacaaaattaggttctgttggcaggggagaaggggaatgaagtaatcaacagaatctcttttagggctttatttataggtcggtgcaaaagtagttgtggtttttaccacttcttttaaaaaatggcaaaaaacacagttacttttgtactaacctactatttatttattttctgagacagggtctcattctatcacccaggctagagtgcaggggcatgatcacagttcagtgcagcctcgacctcccaggctcaatcgatcctcccaccttagcctgccaagtagctggaactacaggtgccaccacacctggctaatactggtattttctgtagagatggggtttcgacatgttgctcagactggtcaattcctgggctcaagtgatcctccatccttggcctcccaaagtgctgggattacaggcatgagacaccacatgctgccatatggctttgataatttcctgagtgggcaccatggatctctttttgtgatccggaccaaaaagcaacttgaacttcccaggatgctcagatgcccaaagcacctaacatgaggggaagatttatggcctagactagactatactggacaccaatttctttgggaaacctcccctccctcgcttccactccctgcagttcaggtgaggctgtttataccccttggttccaccaagaagcatgtgaccaggcctggacaatcaaagcattgccttcttcaagtgacaatgattggttcagagatgaaccacaacttgagttcgtccaatcagagtgaatgctgcaacttcagcagcatttccaggaagtgacctcctttcccaccacactcatacctggcaggatgcaggcctggagctattggttgccagcttgctatcaagtagatactaagactggagccaactcactgaagagcaaagccaagagatggcgagagactatgtctggtaacctcatttgagttcctgaatccagccaggtctgaagccagtacttttcagttacttacttcagtccttttcagttacttaagccaataaattgctttttgcgtaaaaatcagtttcaaatggggcttctgtcatttacaaataaaagaatcctaggctgggcacagtggctcatgcctgttatcccagcactttgagaggccaaggtgggaggattgtttgagttcaggagtttgagaccagcaacatagcaggaccccatctctatctgaaaaagaaaaaaaagggccgggcgtggtggctcatgcctgtaatcccagcactttgggaggccgaggtgggtggatcacgaggtcacgagatcgagaccagcctgatcaacatggtgaaaccccgtctctactaaaaatagaaaaattagctgggcgtggtggcacatgcctgtaatcccagccactcggaaggctgaggcaggagaattgcttgaacctgggaagcggaggttgcagtgagccgagatcgcgccactgcactccagcctggtgacggagcgagactccatctcaaaaaaaaaaaaaaaaaagaaaaagaaaaaagaagtatacatacaaataaaagaatcccaagtttctcagtgtttggaggaacatgtttgaaagacaaattgaaaacatgtttgaaagacaaattcccaggtgaccgagacacctgtgctgggacctgaacctccacctttggaacaagctcctccgggacccctaatgtatgtagtcctgcctttatagtctgagactctctgacccagactttgggggaaggacggtctcttaattctgcatgggaaacaaaagacacccagtcctttccatcacaaagccccagctaccttcttggcaaagagtagggaaatgcctttcattctttcccaatggccctggaattgagaaaatgaaagacagttgatttcccaatcaggttattccaccacgttgaactttcggtaactgtccttgccccatcgtgttgcgaaagcattcaggttgaacagtgttcaggaagaatactcaagcaaaaactggtttgcagccaaatacagagactgcaaaccccagtggcttcaggggccaggcagggaaagtaaacatgtgaaacaatagggagtagtcctgcctgtggggaacaggggagttctcatgccccagcctaataaatgaaaaaattatttatacaccacagtggaaccggagatgcacctaaagccattgggatgtggtttctctttttcatctcactgctctgtctctgatgtggcttcattctcagaggattgtgggctcacaagccaacatcctgacagtttagaaaccacaggagaaatgtttctctttctcaatcgtttcaacataaatcctggatgaaactgttattggccttgtttgagttcaaatggtcatccctgaaccatccctgtacctaaaagaggtatggtggtgtcattggtcagacctgagtctgacccatcctagaatggggttcaggcccactttaaccatatagactgagactggggaatgggaaaggtttcatgcctttgtttgggctccctcagaagcagactctgagatgaggatttgaggtgcaagtggattatttgggagatgatcccagaaagcaccattaggggattgagggaatgagacagagaagagaagcctgcggaaacaggaagtattatccagcaagttactactgtggacaactggagcacaatcccatcagggaactctggcagccagtgtagagcattgttttagtctattttgtgctgttatgatagaataccacagactgggcaatttaaaacaatagaagtttatttggcccatggttatggaggctggggagtccaagggcatagtgctgtcatctggcaagggccttcatgctgcatcattcatggtggaaggtgaaaacgtaagagaaggtgagggtgaacaagagattgaactcgcagccgcaagccctttcacaactggcattaatccattctcatgagggctccattaggctccactccccagcacatttgaattgcggattaagtttccaatacatgcttttggggggacacattcaaaccatagcaaacatagacctcaatgttatcccatcttagtgctgagggagctggggtattcatctaccaacttctgtcagtcattgtctgacagttgctagcaggagagtttttgcccagaacttccagcatggaagagcatggtccctgctggtctgagaaagtcctcagacaaagagacgaagcttgggccagcgtgcattgaaggttaggacaatggccagggcacctatagcctttgcttcattgtctgaaggaaaattggggtgctatgatcagaagaaggcactgatgttgcacaggtcaaacaaacatgttcattcaaggagtgaatcggttggcccattcatcgtctgagtccattaaccaagcaatggcaaggaagggtatactctgttgctctaaggaactggcatggaagctgcacttggcacttttgttcacatctcataggccaggatgtgatcagatggccatatctacatgtggggaaatgtagcttttgactgtccagccaaatctcagggattatggctaggtgtggtggctcactcttgtaatcccagcactttgagaggctgaggtggaaggattacttgagcctagaggtttgagaccagcctgggcagcaaagtgagactcttgcctttacaaaaaaaaaaaaaaaaagtttaaagtagctgggcatgttggcacatgcctgtagtcccagctacttgagaggctgaggcaaggaaatgcttgggctcaagagttcaaggctgcagtgaactataatagtgccactgcactctggcctgggtgacggagtgagaccctgtctcgaaaaaaaaaaaaaaattacagagattctgctacttaaagaaggggaaggaagggccaaatgttttttcctggcaagactttgtgtctatatttcagaaggaatgccttcccagtggacttcagcctacatctcattttcctgaaccatgtctcactgcctccactggagaaccaagtatttagcttcctggtctctctaatagaagaaggcaaggggaaggggattgggagtgggcagtttgggcaggaagatcaaccatcctgatttgcctgggactaaagatattctggagacatgggattttcagtggtaaaaccaacctccaggatctgcagccacaccctatgtagcttgagaccttaactccagttggagaaatgttatcttctctgtcacctcctcctcctaacaaccttctctctctgttcatcacttcctcttcaactaaaaggtggccaggtcctctgctatgccctacatccacttacactctgtcctcatggttggacctccttggaccccaactctgccctgacttctgggaacttcagtggtgccagagcctctgtccagctctcagcatctcccttacctccaccatcttgtttccggccatcttgcgtccttggagtccagagtttgcaaaggtggaaatggagaagctggagagagaaagcgcttgctggtctcactgaaacagtcaggactcaaactctcagcccaaggctcttcgctctgcacccctcaaaacctttggtgcctgttattcaactagcttgacatttctccagctctgaggtgatacctctctccaagatgcctgcagtcagagggcagggggcgtggcacagagtggggcctcaagaaacactgcaaaatacctctagggcccctttctggctctcaaatgatctcggtacgacttgacctgaccaaacagaaagaattcaggctccctcctcaaacctgttcccctaccacctcctaagcggtaggggtggtttggaccccaataatgacatttttatataacttggagtttattattttttctttttcttttctttttttttttttttttttaagacaagagtctcgctctgtcacccaggctggagtgcagtggtgctatctcggctcaatgaaacctccacctcccaggttcaagcaattcttgtgcctcagcttcctgagtagctgggactacaggcatgcgccaccgggcccggctaatttttgtatttttagtagagacaggattttgccatataatttggagtttcacaacaccagcactatttagattttgggccaaataatccttgagtgggggtgggggtgggggctgtcctgttcactgtaggaggtttaggggcaggcctgacctccacccaccagatgcccagagaaccctcctccccagttatgtcagtgcctccagacattgctaaatgtcccctgggagacaaaaatcactcctgaaccactgatctagacggtcaatattttcttaatataaaaagtggggctgggcgaggtggctcatgcctgtaatcccagcactttgggaggccgaggcaggtggatcacgaggtcaggagatcgagactatcatggctaacacagtgaaaccccgtctctactaaaaatacaaaaaattagccaggcatggtggcgggcgcctgtacttccagctacttgggaggctgaggcaggaaaatggcgtgaaccagggaggcggaggttgcagtgagcagagattgtgccactgcactccagcctgggcgacagagggagactccgtctcaacaacaacaaaagggcggggggagcaacaagcaacttcagaaaacgaagtccctttcaatgagtacccaccttctgtggaaaaacctcaagctcactactcaaatgcagcttggaacaaaggctctggcaaccctgccatccagctggcttctctcagtgagtcacactcagagatttctggcgtcactgccactctccccaccccctctcatgcagaacaatgggtctcactctggctctgaccttcttcacacccagcactttactccattttcctggactgggaaagccctttatgttgtgggcaactttgtttgtgctaagtcaacagaaaatgcttcttggcctctaccctcctgagagcacatggtgcattaataagtttaacccagagtttcccaaccttggcgctactgacattttgggctggctcattctttgcttcgggggctgtcctgtgtgttgtctgatggttagcaacatccctggcctccattcacagatgccaggggcaacaccacacctggttgtaaccaaaactttctccagacattgtcaaatatcctctggggaaaaaaaaatcaccctcggttgagaaccgtcgtcaactcctactaggaaccactgaggttagtaatatttttattattattattattatttatttttttattttttgagacagtcttgctctggtacccaggctggagtgcagtggcactatcttggctcactgcaacttctgcctgccggattcaagcgattctcctgcctcatcctcccgagtagctggaattacagatgtctgccaccacgcccggctaattattttgtatttttagtagagacagggtttcaccatgttgcccaggctggtctcgaaattctgacctcaagtgatccacctgcctcggccttccaaagtgttaggattacaggtgtgagccactgtgtccagccatattattattattttagagatgaggaaatcaggattatggaagtgtgatgacttgttcaggtataaggggcaaagtcaggaattggaatttctcccaagccagtgattttcttttccttttttttttttttttttttttttgagatggagtttcactcttgttgcctaggctggagtgcagtggcatgatcttggctcactgcaacctcggcctcccgggttcaagcaattctcctgcctcagcctcccgagtagctggtattataggtgcctgccaccacacccagctaattttttgtatttttagtagagacggggtatcactgtgttgaccaggctgatctggaactcctgacctcaggtgatgcacctgcctcggcctctcaaagtgctgagattacagacatgagccaccgcgcccggcctaagacagtgattttcaaattcgctaactgataaacgtcactggggcccttgctaacagaggcctggccccatgccagacccactgcatcagaacctttaggaaaggggccaggagttctatattctctacaagattcctttcctgacaacctgcaaacatcaatatttaacagccaatattctctgtttttatagcttttctcacatgagcccccactgtttattttttaccttttgttgttgttgtcgttataaatgagacagagtctcattatgttgcccaggttggtctccaactcctgggctcaagtgatcctctcaccttggcctcccaaagtactgggattataggtgtgagccactatgcctggtcttttaaatttttttcgagttggggtgcactggctattcgtaggagtgatcatggcacactatagccttgaacccctggcctcagccccagaagctgggactacagacacacgctcagggtgtccagcttgccattcccacttcagagaagaaactgaagcacacagagattgtgacttgcccaaagccattcagaaagtgagaataggccgggtgcagtggctcaagactgtaatcccagcagtttgggaggccgaggtcggaggatcacttgagcccaggagttggagaccagcctgggcaacatggcaaaactccatctctacaaaaaatacaaaaattagtcgggtatggtggcactcacctgtagtcccagctacgtgggaggctgaggtgggaggattgcttgagcatgggaggtcatggctgcagtgagcaattattgcaccagtgcattccaacctaggtgacagagggagaccatctcaaaaaaaagaaaaaaaaaaatgaggctgggcacggtggcttaggcctgtaatcctagcactttaggaagctgaggcaggcgattgcccgaggtcaggagtttgagaccagcctggcaaacatggtaaaaccccgtctctactaaaaatacaaaaattagctgggcgcggtggcacatgcctgttaatcccagctactcggggggctgaggcaggagaatcacttgaacctgggaggcagaagttacaatgagccgacattggaccactgcactccagcttgggtgacagggcgagactctgtctccaaaataaaaaagtgagaagaaaaataaataaaatttaaaataacaaaaagtaagaaacagaaacatacacacacacaaaagcaaacaaaagaaaacaagaaaaggaaaaaatgaaacaaactagaaaaaacaaaatgagaagaatgtagactgtcatcatgtgccttggccatccctccaggaagatgtcttggagctgggattcgtggataaacaagataaacaagatgtatacattttcctgtgtgcttgcagctacacacacacacacacacacacttgtgcatgcatttggacacacaaacactggggccagagagaggcccagcctccccttagacacattgttgtccaatgtcccccacccccagttggggttctgtaagtaaaaaagaaggaacaggatgagtattcaacaggcaacctttaggttttccatggacctcacctcatttgatagacagaaaagtttctacagcaagttcattggcaggactaggccttgagcccactccctgggacagcggactccacaccacctgttacaactggagattgagtgtctgccggaagctgtttcctggggaactgcagccagctgctggccacacaggagctctttatcccccaccaactcacctccctgggatctacccaggacctgccttcttgagtaacaggatgtgaccctatgtcaccagggcacttgctgcccattgaaagtcctcatgagtcattctccaaggttccaagggaaaaaaaactcctagataggggcccatcccagaaagaaataaaacactggcccagggccgagactttcagagaaaccagctggcctgcttgtgagtgggaggttgcggggggtcaccttgaaccgaggtctctctggacagaactgttttcttattcaatcattcattcatcatctatttatagacatgacatttattcatggattcagctaatatttattaggaggggcaaaataactctcacttctaacctacacatttttgagttgtttacattcattattacacaagtatgtgctgctttcatttttttaagctttgcttttaattaattaattaatttatttatttagcaatcccaggatggagacagatttaattattttaaaataacaggccaggcgtggtggcacacacttgtaatcccagctactcaggaggctgaggcaggagaatcgcttgaacccaggaggtagaggttgcagtgagccgagatcacgccactgcactccagcctcagccacagcctgtctcaaaaattaaaaagagagagagagagagagagagatgctgctttctgatccagaggacatacatgccccactggcaagacagaagatccccaattcggacagctacctggagaagttgacctctaagctgaaaactcaaggatgaacgttgccaggtgacagggaggaaattaccagaaatggtgctctgggcaaagggaacagcatgtacaaaggtcaggagatcatgcttttttccgaaaatgcaagtgtttgagaccatactgtaggaagtgggagaggaagtgatgagctcagagaaaaagacagaaaggcagagagcccacttaaaggaatggctaattaaccacccccattccactcttcccgcccacctccccaccctcatcccactcctaggaccatgactcagtcatgaggttttcacactctctcactttaagctgggcagtttctgtttctcagccaatgtgtcattcatcagcagatcatgtcatcccccccaatccacagcatggttccagaatatcagctgatcctcgtgaattggaccgcaaatcttccagagttttttttttgtttttttttttttcttttttgagatgaggtcttgctcttgtcacccaggctggagtgcagtggcgcgatctcggctcactgcctccgcctcccgagttcaagcgattctgctgcctcagcctcctgagtagctgggattacaggtgcctgccacctacacccagctaatttttgtagttttagtagagatggggttttgccatgttggccaggctagtctcaaactcctgaccttttgatctgccctcctcagcctcccaaagtgctgggactatagacgtgagccgccacactcggccgcttccagggtcttacaaggcgaaaaaaatcttacattgaaaatcaagggagcattaataaatattatagcactgggtgcatcgcccacagataggcaggcaagttttgttcaactggaggcactttatgactaggtctaaagtcgccatttatctgagattgtcctgtctctagcagctgggtctcatttcatgctcagaggaaacttacgaggaaaatgcttttgctatccccacttcacagaagagaactgaagcctagaatgtaagacactcacctcaaatctcatatacctgatcactttttttgaaacagggtctcaagcagccaccccgactggagtgcagaggctggaacacagttcactgcagccttgacctccctgggatcaggtgatcctcccaccttagcctcccgattagctaggactacaggtatgcaccaccacacctagctaatttctgtattttttcttccaagacggagtcttactaagttgcccaggctgcagtgcagtggtgcaatctcagctcactgcatgagatcgtctgctgggttcaagtgattgtcttgcctcagcctcccaagtagctgggattacaggcatgtgccaccacacccgactaatttttgtatttttaggtatttttaggagagacggggtttcgccatgttgaccaggctggtgtcaaactcctgacttcaggtgatccacacactttggcctcccaaagtgctgggattacaggtgtgagccactgcatccggccgcctggctaatttttaaaaattatttgtagaaatgaggtcctgctatgttgtctaagctggtctctaactcctgggctcaagagatcctctcacctcggcctcccaaaatgctaggagtacaggcgtgagccactgtgcccagtcatggtctttgtttaatctttacaatagagcatccccatttacgatatgggaaaacagaggcccagagagctgaagcaacttgccagagacatagcaaaagtaagggagtgctcctacactgctgacaggaatgtaaagtggggcagccactttagaaaacagggtagtagttcctcaaaagactaaacaagctgggtgcagtgatccaagtgcttgtaatcccagcactttgggaaactgagacgggaggatcacttgaacttgggagttcgagaccagcctgggcaacctcgatagtgagaccccgtctctattgaaaaaagaaaaaaaagtgtaaacatagggttaccatatcatccagcaattttccccctaggtatatgtccaagcattgaaaacatatgtcctcacaaaatttgtacatgaaagttcactgcagtattattcattatagctaaaagtgaaaccaatccaaatgtccaacaactgatagatggatatatatattttagacagagtctccctctgtcactcaggctggagtgcagtggtgcaatctcggctcacggcagcctccacctcccgggttcaatcaattctcctgtctcagcttcccaagtagctggtattacaggtgcccaccaccacacccagctaatttttctatttttagtagagacggggtttcaccacgttgaccagaccagtcttgaactcttgacctcaggtgatccgcctgcctcagcttcccaaagtactgggattacaggtgtgcgccaccacgcccagcctataaatgagtaaataaatgtatgtatccatacaatggagtcttactgagcaataaaaagaaatagaggctgacacttactacaatacagattaactggaaaaacatgttaaacaaaagaactggccgggtgcggtggctcatgcctgtaatcccagcactttgggaggcagaggcgggcaagagttcaagaccagcatgggcgacacagtgaaaccccatctctactaaaatacaaaacattagctgggcgtggcagcgcgcacctgtagtcccaactacttgggaggctgaggcaggagaattgcttgaacctgggaggcggaggttgcagtgagctgagatcgcaccactgcactccagcctgggtgacagagcgagactccgtctccataaaacaaacaaaaaaacgagcaaaacacaaaaaacaaatgaacagcataaaggagcttatgttacatgatttcatttatgtgaaatgtccagtataggcaaatctgtagaggcagaaagtagattagtggttgccagggcagggggacttgggagaaaatggggattgactgctaacgtgtatggggtttcttttgggagtggtgaaaatgctctaaaattgattggggacttggttgctcaactccaaaggtatgaaaatgaaaacccatgaaatcatacactttaaataggtaaattatgtggtatctgaattatatctcagtaaagctcttacaggaaaatgttttaaaaagtaataataataggggccaggtgcactggctcacgcctgtaatcccagcactttgggaggccgaggtgggtggatcacctgaggtcaggagttcgagaccagcctgaccaacatggagaaaccccacctctactaaaagtgcaaaattagccggacatggtggcacacacctgtaatcccagctacttgggaggctgaggcatgagaatcgcttgaacccagaaggtggaggttgcagcaagccgagacagcaccactgcgctccagcctggaaaacaagaggaaaactttgtctcaaaataataataataataataataataataataataataataataggccccagcacaatggctcacgcctgtaatcccagcactttgggaggccaaggcaggtggatgacttgaggtcaggagttcgagaccagcctagccagcatggcgaaacctggtctccactaaaaatacaaaaattagcctggtgtggtggtgcatgcctgtggtcccagctacttgggaggctgagagagaagaatctcttgaacccgggaggtagaggccacagtgagccgagatcacaccactgcactccaggctgggtgacagggcaagactccatcttaataataataataataataataataataataatggggtaggctgtgatcatgacctaaaccatgatctatgtttgaacatctgcacttactatgtgctcaactagcctgagccaaaatgagcaaggaggggagcagaatacattagctcacacagttgaaaaatccaggagtatttcaggtatggctggatccaggagcttaagtaatgtcagtgggactttgtcttgctctatttctccagttcagatttgccctgtgctgccttccttttcaagtaggtgacaaaaatggccttggcagctctagactgctgagctcttactaccctgagggagtatctttttccttatagtgtttagtaaagatctgatggaaggttcacactgatctgactggggtcacttttgaattaatcgccatagccaggataattttctgctctggtgggctaagactgggtgatacaacccattctagagccaggtttgtggtcagcttcacccaaaccatatagattataggggtggggtagttccccaagggaaaattaggattctgggcaggctcaagtcacagatacccacagtattcggacagtgtggaccctgctgcccaggtttgacccttgctttttccacatgccagctatgtgaccttggcaaagttctttttttttttctttttttttttttttcctgagatggagtctcattctgtcacccaggctggagtgcagttgtgtgatcttggctcactgcgacctctgcctccggggttcaaacgattctcctgcctcaacctctcaagtagctggattacaggtgcctgccaccacacctggctaatttttgtattttttggtagagatggtgtttcaccatgttgggcaggctggtctcaaacccctgacctcaggtaatctgctcgcctcagcctcccaaagtgctggtattacaggtgtgagccactgtgcccagcctccccagattattattattattattattttttttttttgagatgtagtctcactgtgtcacccaggctagagtacagtggcgcaatcttggtttactgcaacctccgcctcccaggttcaagcgattctcctgcctcaggctcctgggtagccgggattacaggcgcaagccaccacgccaggctaatttttgtattttagttagagacgaggtttcaccatgttggccaggatggtcgcgatctcctgacctcgtgatccacctgcctcggcctcccaaagtgctgggattacaggtgtgagccaccgcacccggccccccagattattctttacaatggacaatccacagccacaaagctaagagccaggtgcttggtttttcaattttttttctttcttttctttctttcttttttttttttgagacggagtctcgctctgtcacccaggctggagtgcagtggcgcgatctcagctcactgcaagctccacctcccgggttcacaacattctcctgcctcagcctcccgagtagctgggactacaggcgcctgccaccacactcacctaattttttgtatttttagtagagacggggtttcaccgtgttagccaggatggtctcaatctcctgacctcatgatctgccctcctcggcctcccaaagtgctgggattacaggcgtgagccaccgcgcccagcctgttattttttctttaaacagtgaagagggtttcaaggaatctctccttaaaggcaaagaccctgcccaactgagtgttgaggcctttgtagtggactgacctgggttaatttctggctctgggttctgccttgggcaaatcactttctttctctaagcctcagtttcctcctccatgcaatgggcagagtagaggggaataaatgagaatcatctcaagtattgactggctcagcacagtgcctagaatctgtgtctaataagtgaacttttattttcccttttttttacttgtttatttgactacatgaataccttcaaaaagtacagagtgaaagtaaagagtgaaaaatgggtgggtctcccttcctccctgttcctttacccacccacttccctttcagagatataatcaggattacaggtttcaaaacggttttgaatttataggactataacaagaataattcagagaattccatataccctttacccagaatcacctgtctttactattttgccatgtttgttttattatcttttctttcttcatgtgactatgtttattattattatttttctgaactattatagttttcatacatcatgccgcatttacctcttaatatttccgcatatgtttactaggaacacgatattatttgctgtaaccacagcactgttaccaaattcagaaaatttaccttgatgccccatttacctcataatatttcagcatgtatttcctaagaacaagatattatttgctataggctgggtgcagtggctcactcctgtgatcccagcactttgggaggctgaggcgggtggatcacctgaggtcaggagtttgagaccagcctgaccaacatggcgaaaccctgtctctactaaaaatacaaaactagccgggtgtggtggtgcacacctgtaaccccagctacttgggaggctgaggcaagagaatcgcttgaactcaggaggtagaggttgcagtgagctgagactgcaccactgcactccagcctgggcaacagagtgagactctgtctcaaaaataacataaaagaaaatagatattattttctgtaatcacagcagtgttactaaaaaatttaccttgattaccatccatacgccaattttgtcagttgtggtaaaaaaaaaaaaaaaaaaaaaaagaatcccttacagctttttcccgcctagtgcaggatccacttcaggaccatgttttgtctgtcttttttattttttttttcttgagacggagtcttgctccgtcacccaggctggagtgcagtggcacaatcctggctcactgcaacctccacctcctgggttcaagcaattctcctgtcgcagcctcccgagtagctaggactgcaggcgcctgccaccacgccctgctaatttttgtatttttagtagagatgggatttcgccttgttgatcaggctggtcacaaactcctgacctcaagtgatccacccacctcagcctcccaaagtgctgggattacaggcttgagtcaccgcgcctggcctaattgtctctcatctgaaatgatgcctctgcttttctttgtcttttatgaccttgacattttttgaagaatacaggccagttatttcatagaatgttcctcatttggggtttgtttaacagagtaccccaaatttctgtaggataggaattcaggaagggcatagtggggaaaaattctatctgctctaaggctcactcctgtaatgccagcactgaggcctcagctggaaaactcaaaggctagaagcgagagttacctgaagtctcactgtctggcagctaatgcaggctgctggctggggcttggctgaggccccacacacagcctctctacgtatcctgagcttctttccaactatggcagctgggatggaagggcaagcatccaaatggagaaagccatactgtcttttttattttttatttttattttttgagacggagcctcgctctatcgcccaggctggagtgcagtggtgagatctcagctcactgcaaactctgccctcagggttcaagtgattcacgtgtctcagcctcccaagtagctgggattacagacgcccgtcatcatgaccagctaatttttttggagacaagagttttgctcagtctcccaggctggagtgcagtggcatcatctcagctcactgcaacctccaccttctgagttcaagtgattctcctgccttagcctcccgagtagctgggattacaggtatgtgccaccacgcccagctaatttttgtattattactagagatggggtttcaccatgttggccaggctggtctcgatctcctgatctcaggtgatccacctgcctcagcctcccaaagtgctgggattacaggtgtgagccaccgcacccagccactaatttttatatttttagtagaaatgggattttgacatgttggccaggctgggtttgaactcctgacctcaagtgatctgcccatctcggcctccgaagtgttggcattacaggcgtgagccgccacacctggcctgtcaatattgttttaatgatggttgctccttctcaggctttcctcacatactgttttttttttttttagacaggttctggttctgtcacctaagcctcctgagtagctgacattacaggtgtgtgccacgagcttggctaatttatttatttattatattaaatatatatatatttatatataatattaaataatatatgtatatatatttatatataatatatatattaaataatgaaatatattaaataataaataaataaataatttatttattgttttgtagagatgggagtctcactatattgcccaggctcatctcaaactcctggcctcaagcattccttccacctcagcctcccaaacggctaggattacaggtgtgagccaccacacccagccctccctcatacattcaaatggccaactcccttggcttcctcaagtctttgcttaaatgccatcttctcaggaagtcattttctgaacactctattaaaaattgcaacctgcccccaaacacgtcttgcactcactgtccgtgtctctgcttaaattttctccgtagcactcataccatctaacatactgtgcatttacttgtttatttttatttttttgagacagggtctcactctgttgcccaggctggagtgcagtagtgtgatcatggttcattgtaacctctgtctcctggactcaagcaatcctctcaccttagcctcccaagtagctggtaccacaagtgcacatcatcacacctggctaatttttgtattttttgtacagaaggggtttcgccatgctgaccaggctcatctcaaactcctgggttccagcgatccacccgcctcagcctcccaaagtgctgggattataagtgaaccatcatgctgggcaatttatttatttattttccgtttccctctactaatgaatcagctccaggagtgcagggaccttgtctgttttctacacagatgcgttcccagcacctagcacagtgcctagcaggtatgtgaatgaatgaatgaatgaatccatgcatgcatgaatgaagtatccttgtacaaaccatgaaccatgtacatgttaggtgtctacaacttgtcgtttgaattaatgaataaaagaacaggcaaggcgcggtggctcacacctgcaatcccagcactttgggaggccgaggtgggcggatcatctgaggttgggagttcaagaccagcctgactaacatggaggaaccctgtctctactgaaaatagaaaattatccaggcgtggtggcgcatgcctgtaatcccagcttgggaagctgagacaggagaatcgcttgaactcgggaggcagatgttgcggtgagccaagatcgtgccattgcgctccagcctgggcaacaagagtgaaactctgtctcaaaaaaaaaaaaaagaaagaacagacagcaccaaccctccttgtaagttcaatatgaggttgatctgaagctgccacccaaggctactgatcaaaatatccttctaaacaagtctgtcccacagtcctggcgtctgataatatggacagtcaggctggctggcaccagactggacccagatgaaggaatggaatcaggccacattacaggggcaagaggagccttgtggccagaggttctagaggtcagcagcaagtcatgcatctgaagaggaagttgattgctgtacctcaagctgaaacagaaactgcggtggctagcaaggaagggtccccacctgtgcgcctcagccccttggccattgccagcttccaacagaccacagagacttttgggggaaaacttttttattgaagtgtaacagacatacagaaaagtgcacaaataaggaaagtgcacaggggagcgatggctcgatacattttcacaaaggcagacagcggggtaaccagcccccagctcaaggaacagaacattccccgccccggagaagctcccttcaagtctttcccatcctaagcgataaccgttatcctgattccaacagcagtgatgatttttgccgttttttgaacttgatgaaatggcagcacataacacgtattcttttgtgtaagacttacttactacaaactttgtatgtttgtagcaacagccttttgaccctgtctcttcctccatgccctcaaagagaaaaaggaacctaataataacacaaaataaagcgaaagcatacttgcttgactggtttaaatgtgccatctggccgggcattttggaggccgaggcgggtggatcacttgaagtcaggatttcgagactagcctggccaacatggtgaaaccccatctctactaaaagtacaaaaattagctgggcatggtggtgggcacttgtaatcccagctacttgggaggctgaggaaggagaatcgcttgaacctgggaggcaggggttgcagtgagcagagatcgtgccactgcactccagcctggatgacagagggtgactccatctctcaaaaaataaaataaaataaaataaaataaaataaaatataaaataaaatgtgccatccattctttcatgcttcagccacccagtgggctggaactgttactgcttccatttcaaatattgggaggctgaggcacagagaggttaaataatttgctcagccaggaagtgaaggtctgtatttaaagccaggtctctctgatctccaagctcatgttctaacccagcatacactccttatcaataaaatgaccatgtattgaacaccctctttggactgaatactatacttcaactttatgtccattgtcttatttgattttcccagccgttgatgagtaatataccattatccttgcttagcaaatgatgaaagcagggttcagagaggttaaggaactttcctaacgtcatacagcccaggaaggcatgaaataaaaatttaaactctattttgttgattccaaagtccagtgcagaacgatatcagtacccagcatttatgcgcatctttcaaatataccttctgaggccctgcagggtggctcatgactgtaatcccagcactgtgggaggccgaggtgggtggatcagttgaggtcaggagttcaagactagcctggccaatatggtgaaaccccgtttctattaaaactacaaaaattagccgggtgtggtggcacacgcctgtaatcccagttacttgggaggctgaaacaggagaattgcttaaaccccggaggcagaggttgcagtgagccgagattgcaccactgtactccagcctgggtgacagagcaagattctgtctcaacagaaacaaacaaacaaaaacaaatataccttctgagtttttcaaaaaagagacaacaatagcagttaccttttatggatcatctcagagtcagttgttttggtcaaagattgcaaatgatcccttaatttgtgttcttgtcttctctctcctagtaagagtatacctgatttttagcttggcacatggcttcccatggctttactacctatctcagccttccttgcagctaggggtagccacatgactaacttatagccagtgaagaactgttccccgacatgcccacatggctcatgtcaaccccagcattacatcatttgtttaaactctcagtttctctgtcttgaaaatagggatttaaatatttatttaagccaggtgtggctgaggtgagaggatcacttgaggccaggagttcgagaccagcctgggccacacaatgagacccctgcctttacaaaacaattttttaaaaaaattagctgggcatggtggcgtgtgcctgtagccccagctactcaggaggctgaggtgggaggattacttaagcctgagaggttgaggctgcagtgagccttgattgcgccattgtgctgcagcctggatgacagagcaagaccccatctcaacatatgtgtatacatctatctatctatctatctatctatctatctatctatctatagctatatctgtctcatctctctctctctctgtctatatatatatatatatatatatatataaataaatatgttcttttttttttaatttaacaaaagcaggaagtagacagacacagtgggtggttcatgccagtaatcccagcactttgggaggccaaggcgggaggattgattgaagccaggagtttgagaccagcctgggcaatatagtgagacccctaactctacagaaagtttaaaaaaaaaaatcagctgggtgtggtggtatatgcctgtagtcccagcttcttcacatcactgcactccagcctgggcaatagagcataaccctgtctcttaaaaacaaaaaacaggaatatatgtagtagagtcaccttgagtgtggattgggagaagaagctaggacaggaaggacactaatgtgtttgtgttgggtaaacaaaccctgtttattgggagaccacctgctccagaagaaaagacaccaggtgaagacaggaagctgggtgctgctaactgaatgagctgggacaaggcccttcccttacctagggatagataataaaaaatattttattgtatatttttaaggtagtagttccttgtctgcagagtggggatttagattacatctatccttttggttttgtctactcactatgaattcccctatcataacagcatcctaatttctctgggagcccccttctttactccctgtccatgtgaaaggcatgcagcactaactttatccttggttccaggaaggccaatgctccatgctggccaatcagcacccctcatttctctgcccatagggattggctcagaaatgggcacctgccccaagtggaccagtgagttatccctcaggtttttgctgggattgttttgcttctgctgcgctaggctggtatgaagagggtctgaagctcaaaggtagccaccattgtgagagtgaaagactgagccctgataacttatgaacccctgaatccagctgtacctgaaggcagccacatattcctgaacatgttattctccatgagtcaatatggttcctctttgttgtttttttgttttttgtttttgaaatggagtctcgctgtcacccaggctagagtgcagtggcaccatctcagctcactgcaacctccacctcccgggttcaagcaattctcctgcttcagcctcctgagtagctgggactatgggcacgtatcaccacgcccagctaacttttttgaatttttagtagaaacaggattttgtcatgttggccgggctggtcttgaactcctgacctcaagtgatccacctgtcttggtctcccaaagtgctgggattacaggcatgagccaccgcgcccatcctcaatatggttcctctttggacttaagtcactgtagcagatgacgtggcttctgtgtccatatccccttggcattcatccttttgacccacagtgagtggatggcttcaaatttccacgcctatctttgcagcctgagggctttgctctcatatacgctctgcatacacagtctgagaatgctgggggcttcaccctcccctacaagcagcccttaaccaatgagtgacaggggctggtggataaatgtccccactcccttgcccttcacctggataattctgaggtgtattgcactctgtgtcccacagttccccagcagggttgagccccagctgcccagagtgataacctgctcagtaacttaccttctattggtttctttcccttccctgtcctacttccctccccgaccagagcttcctgggatcatttctcaagtaaacgatttaatatctgcacacaaatccttgtctcagatctgcttctgcaggaaaccaacctaaacgtttcgtaagattggttttctgtcacgcacagctaaagctgctctggcagacgcatggttcaagaattcttttaaaatatttgcctcataactgtatttttccagcctgcttttcagctcaaaggaagtatatgcactgagttgacttatcagtgtgcatagcagaaagggacccagtaagagaaagccccctgagaggccctgggacagctgagtgatccaccctggctgcctcctctccacctcattctcacacactaacctttcccaacccttttcattccaaggctcctagccagcgccccccacctgccttaggagataaccccagttccttcctcggattctttcatctgcaaggcctcagtgttcttgtccggccagtgataaggacattcaacgtcattttcctgtccctgacctttgaaagaaccctacccatctggggcctgtgatgtagactcagactgagatgttccatcttggggatataatcagtgggaaagagagagattcctgagaggtcatcattcattcattcattcattcaagaaatatttatggagtgcttgggcaaggaattctaaattgcagagtcaactagagccagcttaagcagaaaaggaattttttttttttttttctaagatggagtcttgttgcccaggctggactgcagtggcacaatctcggctcactgcaacctccgtctccagggctcaagtgattctcctgcctcagcctcccaagtagctgggattacaggtatgcaccaccacgcctggctaattttttgtatttttagtagagatggggtttcaccatgttagccaggctggtctcaaactcctggcctcaagtgatccacctgcctcggccttccaaagtgctggaattacaggcataagccaccgtgcctggcccacaaagggatttatgaaaggtaggaagtactctagatgttaaatagccacaaacggtgcagccaggagcatcgatgccaggagcaacactcaccttcactgttgaactgttctaatcaaaatatcactgctgctgctgcccccctctccccaaactcaggacctaggtagctagagacaggctgctagaattgccccatgcttccccagaaggaccagataccgctcccactgtgcttgccagaagactccaccacttggcatccttctgcttgcttctgtctccaaggcttactaggggaacccagatcacataaggcactcttgctgcaaagaaatctcagaatgtagtttttctctgtctggcctttacagtacaggaggtcacactacaggggaatgggataggtgagtgagccaatctgtagtatctgccgtaggctcacaacaatgataaagtcagggctgggcacagtggctcatgcctgtaatcttagcactttgggagaccaatgtgggaggctcccttgaggccaggagtttgagaccagcctaggtaacagtgggagaccactccatctctaccaaaaaaaaaaaaattaagtggtggtgtgtgcctgtagtcccaggctgaggagggaggaatgcttaagcccaggagttcgaggctacagtgagctacgatcgcaccactgtactcccgcctgagcgacagagcaagaccctgctctaaaaaagaaaaattaaaataaaaaaattttaatgataaaatcagaagagtcccctgctttccaggagctcaccattgacaggaggatatcaacaccaagcaattccaggagggagagcattccaaaagggaaattatagacagttacacacacatagaccaagaaaactcaacctattctaacaggacctcctgaaacaggtgccgttgtacatgatgtgtgaaggtgtttagaggctaaccaggcaaaagaagggcaagagggaatagcacttcaggcaagggaaaatctcatatgcaaaggtccagtggcagggaaggtgaggggtgcaggaggaagtgagagaagcccacttctctctgactggagaacagagaacaaggggaacagagggaaggaagaggggcggtaagggaatagaccatgaccttgtggtccatgatgtggaattcaaactgtctcctaaggccagtggtgaccactgaatgcttatgagtaaggcagtgacataatagcaactgctaatatttatttatttattattttgagatggagtttcactcttgctacccaggctggagtgcaatggtgtgatcttggctcactacaacctctgcctcccagttcaagcgattctcctgcctcagcctcccaagtagctaggattacaggagcctgccaccacgcccagctaattttttgtatttttagtagagatggggtttcgccatgttggccaatctggccttgaactcctgacctcaggtaatccccccaccgtggcctcccaaagtgctgggattacaggtgtgagccaccgtgccctgcctgctgatatttattgaccacttattcagtgccagacttttttctaagctgctaacatgtatcatttagtatgtatttgcaacaaccctgtaattaaggttctccagaccacgagcaaattactcagccattctgtgcctcagtttcctcatatgcacaatgggagtaatcatagaacctaccacaaagagttagtatgagggttacaatgagtgcttggcacatgggaaatgctgtgtatgtattagcttttgctactattattcccattttatagatgaaaaagctgaagcccagagagatgaatcagtttgtctgaggtcacacagctaatgctaataaggcatagaatgaacaggacaggtgtggcgaaggtagaagtgctggtgggcgtggagaagccacatcttcatcctaggagtgatggaagtgtggaccacccattgggacccatgtggccagcctctgttctgactggtcagtgcctaggtcatgccggttcttaaatatttcattatcaccctgttattactacatatatgacattgttttgtggatttaatatttacacaaacggtatcatactaaatgttaacttctgcaagtcccttttctcactcaacattactgtatgtttaagatctgtttagatctagttcattcattttattttcttttttagagatggggtgtcactatgttggccagtctggtcttgaaatcctgggcttaagtgatcctcccaccttggcttcccaaaatgttgggatgacaggcgtgagacaccgtgcccagccattcattcattgtttttttttttttttttttttttttgagacagagtctcgctctgtcacccaggctggagtgcagtggctcactgcaacctctgcctcctgggttcaagcgattctgcctcagccttctgagtagctgggactacaggcacatggcaccacacctggctaattttgtatttttaatagagacggggttttgccacgttggccaggctagtctcaaactcctgacctctcaggtgatccacctgccttggcctcccaaagtgttgggattacaggcgcgagccacaccattcattgattttaattgctcactagtattcctttacaggaacatgtcatggtctccttgcccactatcccatggatgcctatttagtccactgcactttggacccattgtaggcaaagctgccacacccaactttgcatatgttgaagcttctctagggtgaataccaggaagtgggatcactggtctcagagttcatacgtttcaactgccaagcagcagtacatgaagagttcttgtttctgcacttccttaccgatgaaaataataccactaccccacatgacacttactatgtgccaggcatctttctaaacatctaacatgaaataactcatttaacctctcaaaaaactttgaggtgaggtactatcatcatctccactagatagatggagaatgaagacacagagagggcaaataactagcccaaggtcactcagctaggaatagtagagcatggcatgaacccagagaggctggttccagagcctgggctgttcatcactcctgtaggccttggaattttctggttttcaagttgctgccagtttatgactgtgaaatgtctctaagtgctttaagttgcattgcctgcttagaagggaccttgaggacctttccatccattttttggccaatcaagcatcctcttcagaaaaatgcctctttctagccttggctgtccctgagtttctgatcttttctgcaagtatgcctggaggccaggacttggggcggggcctggcacagtgagcgcacttggtaaaaatgtaccagactcaccaggcatggtggctcatgcctgtaatctcagcattttggaaggctgaagcaggcagactgcttgagcccaggagttcaaaaccagactggtcagtgtagtgagaccctatctctacaaaataaaaattaaaaattagctgggcgtggtggcacatgcttgtagtcccagctactcaagaggcctctgagatgggaggatggcttcagcccaagaggtcgaggctgctgtgagctacgattgcaccacagcactccagcctgagtgacagggcaagaccttgtctttgggaaaaaaaaaaaagtgttcactttggcagcgcatatactaaaattggaacaatacagagattagcatggcccctgtgcaagaatgacataaaaaattgtgaggtgttcgatatacaaaagaaaaaagaaaaaaaagtgccagactgactggtggtgtctttcacgtctctcaccctctcttcctcctgggaggccaatgctgatgaataaagcttctgcttaagtcactggcccacgtctgtgctgtgctgggcacgcacagtggccctcttgcctcaagctcatttcctcttctgttatctgaccctaatctagttcatgatctgatctcatctccttcgactctccttgtctcttgtttctcatgaaccccactggctgtcctcctgtctcttcagtggccaagttcatttctacctcaggacttttgcatgtgctgcttcctctgcctggaacactcttcccgtagtggctccaactcatccttcaggcctcaactcaaatgccacctcctcagagagactttcctgatcactctgtttagaagaaacagaggcatgaagagattgagcataattgtcaaaaattgtacagctggcttattgatgagatttttgaattatgttatcttattatgtgcctatatttctaaattttttctacagtggtgatgtgttccctgtgtgaattttttaaacctcaaattcaggctggacattgaggctcatgactataatcccagcacttagggaggctgaggcgataggatcgcttgagctcaggagttcaagaccagcctgggcaacatagtgagaccccatctctacaaacaattttaaaattagccaggaatggtggcatgcacctgtagtcccaggtactggggaagaagaggtgggaggatgtcttgaggctaagagttggaggctggagtgagctatgatcacaccactgcactccggccaggataacagagcaagactgactcttaaaaaaaaaaaaaacaggccgggcgtggtggctcacgcctgtaatcccagcactttgggaggctgaggtgggcagatcacgaggtcaggagatcgagaccaacttggctaacacggtgaaaccccgtctctactaaaaatatttaaaaattagccaggtgtggtggcgggcacctgtagtcccagctgctcaggaggctgaggcaggagaatggtgtgaacccaggaggtcgagcttgcagtgagctgagatcgcgccactgcactccaccctgggcaacagagcgagattccatctcaaaacaaaaacaaaacaaaacaaacaaaaaaagcaaaaaagaaagacctcaattgttgttgttgttgttgttgttgttgttgttgttttgagatggagtcttgctctgttgcctaggctggagtgcagtggcacgatcttggtttactgcaacctccgcctcccaggttcaagcaattctcctgcctccgcctcgagagtagctgggattacaggtgcccgccaccatgcctggctaatttttgtgtttttagtagaaacagggtttctccctgttggccaggctggtctccaactcctgacctcgggtgatctgcccaccttggcctcgcaaaattctgggattacaggtgtgagccaccacacccagccaagacctcaaatttaaaatgaattaagagccaatcctgagagaatacgaatgagtgtctggggctctgtttttcaagcctcctgggtcagaataagatcatagcattcttcatcctccatgatttccttactgcccactttcccacgcctttccatctgacgatcgtccctcttggctctgaatcagaaggctaaaagcaaagtgtaggtccacaatcctctctgataatcagcctccccttccctacagatgtttctcattgcaaaatgggaataatgccaggtgcggtagctcacacctgtaatcccaacagtttgggaggccgaggagggaggatcacttgaggtcaggacttcaagaccagcctggccaacatggtggagccccatctctactaaaaatacaaaaattagttaggtgtggtggcatgcacctataatcccagctacttgggaggctgagacaggagaatcacttgaatctgggaggtggaggttgcagtgagctgagattgtgctactgcactccagcctgggtgacagagagagactccatctcagaaacaaaagggataataaaagacctacttcacagggattcagcatgatggggctgaaagacatttggcggaaggaagactattgctgtgtgggaaccgtactgtgtggtgagtttggagtcagataaactctggatcaaaggccagctcactgtgtgatctcaggcaactcaatctctgagcctcactctctctgtaaaataaggacaataaaaatacctactgagttctttagaatgcccttcactagaaagaagtgggtaacaaaactcaagcgtgctttactggaacaggctcccctggctccccacacaggacatttctaggacgggggagcaggagatccagcagcctagtgatctcatcctggagccaggctttttccatgtctccgtccacagtgttggtttcatcctcaggctggtcctcctcgtgatcgcaggatgactgccaggagctatcagggccacgggcatcctctttcatgtctggtaggaaaatagattcacttccaggccatcttcctggaagagtgaggaagaactttcccagaagcgtctggcaaacttctctccacttctcattagcctgaggtaggtcagaggcccattccggaaccaaactctggcaaaaagatgcaagtctcatgattggcttagactcattggttccagtgcctgtggctgggctgggatggatgtcgaggagtcagtcaacaacattgtcctctctacctgcctcgaacagttactgggagaagaaaatgagatcatgcttgcaaagcttagcatacagtaggtgctcaactaataatagctcttattactattacaggctgagtatccctcatccgaaatgcttgggaccagaagtgtgtcagaattcagattgttttggattttggaatatttgcattatatttaccagttgagcattcctaatctgaaaatctgaaacccaaaatgctccagtgagcatttctgttgagcattacgtcagtgctcaaaaagtttgggattttggcgcatttcagatttcagattttcagattagggatactcaactgtattattattattttcttttttgagacagggtcttgctctgtctcccaggctgagtacagcagtgcgatcttggttcactacagcctcaacttcccaggctgaagtgatcctcctgcctcagcctcccgagtagctacctgggaccgcaggtgccaccacaccaggctaattttgtttagtttttgtagagaggaagtctcactatgtttgccaggctggtcttgaactcctggactgaagcgatcctcctgcctgggcctcccaaagtgctgggattacagacatgagccaccgcacccagccttcaacagtattctgattattatcaacatcaccatcatcctttgggggctttgatgtcaggcaggctctgatcaaatcccagtttctccacttcttagctgtgtggcctcatgcaagttgctgagcttcagttccaccctgcaaaatgggaatgataagtgctcctatctcttgtcattactgtatgaaaatagttaatgctccgtatgtgccgataatgcagtcctttggccttcccattaggaatttgggtggccttttcctgccctcagtagatgtgattcaggtgagggagactctcccttctattccagaagtgggcacattctcctcacttgaatttctgaatccctcaggtcgatatgattggttcagggagccagagaaagagagtctgtctatcctctagaattgctggctggaaaagtggaagctaggagctgcgggaaaccatcttggggagagctggcttgaagtggagccaacaagagaggaagcagagatgagagatggagagaggcagaggactgttgactctgttgagctcctggatccagccatgcctgaatcggatttaccactggacttttcattatgtgagccaataaattccctttttttttttgtagaagaagccagtttgaggcgggggttctgtcacttgcagtgatgtgtgtggagtctagtccagaccaggcaggatggggaattagaaaaggagatagtcctctgagggcagaattatgcctacctaaatcagcttggtattccaagagttttgcccaggccaatgcatagaatggaactccagaagtattaggagttaaaagcataaataggctgggcctatttgtgccctataatcccagtactttgggaggcctaggtgggaggttcgcttgagtccaggagttcaagagcaacgacaacagcctgaacaacacagtgagaccccatctctgcaaaaacaaaaataaaaaattagctgcgaatggtggtgtgcacctgtagtcccagctactggggaggctgaggtaggaggatcgcttgagcccaggagtttgaggttgcagtgagccactgcactctagtcggggtgaccgggcaaaacctcatctctaaaagtaaaaaaaataaaaataagaacacaaatagagtctagtgagtatccctccagacttcttctctgtgcttataataaatagtcatatacaaacacagaagaatatttttacaaaaatggaagcacactctacattttcagttcaaacactccctccccagtgaccaccccatctgaagtggctccgtctccatcatgctttcttgcatgctagcgtttttcactccctaaattaacttattcagagcagacatttttctctgtttgccactgctgtgtcatcagtacctttcacaactggccaagtatccaacacacatttgttgagtaagtatcactctgtagtttgtgtgtttcttttaacttgtagcgaagtagacatggatctgctttgacctttgagacgaatgcatggagatctattgatcggatgggccacgtttgtttcccacacttcgttgaaaaattgggggtgaaaaaaactgggagtgaaaaaatggccaaaccaaaagaagggtgagtcattccctcctaccccaaaatacagaggagagggtgaagaaggaggaccgcccctcctcgctccagtaaagcctttaacaggcccatcctgatttacagggagcggacttggtttcctgttcaagaatttccaaggcaaaaacaatcctcaaacacatgaagatgaggttgggcaaataactcatggatggtctcaacgctggagggcaaagttgtttattaagctcccgaccctcaaagggaattacttaaatttttttcttgattataaaagtagtattccagcctgggcaacaagagcgagactccatctcaaaaaaaaaaaaaaaaaaaaaaagtattggctcatcactatgaaaaagcattttcagagaatacagaaaagtgtgaggaatagaataaaaaacagtcataattttggagcattttgtaagttagcccatagattttttaaatgcatacacatgtacttaattctaaagtgaacctgtgctatctttttatttaacagtaatcctaagatttattgagtatgtacaatgcatatgctagttgctctctgtgtattaatccattttatatttacagtagtcctgtgtgataagcactattattaattcaattttatagatggggaaactgaggcagagagcagttaagtgatttacccaagatcacacaaggtggccaagctggaattcagaaacaagtaatctggcttcaaggcccatgacgttaaccactatactacattgctaaggcagagcagagacccctcccaagttaatacccatagatatgagtcatcctttttagtgcctgcacttattcttctattactagataattgggctttttctagtttccccctactaggaaatagagagaaacttcccttttgggctttaaattagacaagaaaatatgcggttagatgtcaccacaacttgtacttcttttttttttttttttttttgagacagggctcgctctgtcacccaggctggagtgcagtggtgcgatcacagctcactgcagctttgacctcccaggctcaatctattctcccgcctcaatctattctcccacttcagccttctgagtagttgggactacaagtgcacaccaccgtgcctgactatttatttctcttttctgtagacatggggtctcactgtgttgcccaggctaacaactggtatttctaacccaggagaagcaacgaagggctcagccctactttgaagcaatcgccccattatgcacatatatattgactgggggaggttattttatttaagaaacatccatgaagtacttatgtgccagacagacatggcttcaagaacttctgaataggctgggcacggtggctcacgcctgtaatcccaacactttgggaggccgaggcgggcggatcacgaggtcaggaattcgagaccagcctggccaacatggtgaaaccccgtctctactaaaaatacaaaaacttagctgggcgtggtggtgggcgcctgtaattccagctacttgggaggctgaggcaggagaattgcttgaacccaggaggcagaggttgcagtgcagtgatccgaggtcacgccattgcactccagcctgggcaacaagagtgaaactctgtcttaaaaaaagaaaaaaagaaaaaagaacttctgaatattagctcacttcacccaaaaataatactctgaaatacataccagggaaactgaggcacaagggggttaacttgcccaacatgacagaggcagtaagtggcagtgctgagatctgaaccccggaagcttggctccagtgtctgggttcttaactcccaatcagcctctctgtctaccccttggcccaagagagctggcccgccctggggtactcaaagcaaacccactttcagctgaggactgacggcagcaaggtgaatatatctatttttccttttaagtgatactcatgtattagctcacagttctgtaggtcctaagctcatgcaggctctgctgtgttatacgttcagggcatcacatggctgaagcagagatgtcagctcactggagtcctcatctggaggctatgggaggaattggactcttttcagattgttggcagaattcagttccttgcagctgtagaactgaagcccccatttccttacttgcgattctctctgcaactagaagcttcctgcattccttgtcctgtggccccttcttttttttgagacagagtctcgctctgttgcccaggctggagtgcagtggcgtgatctcggctcactgcaagctccgcctcccgggttcatgccattctcctgcctcagcctcccgagtagctgggactacaggcgcccgccaccatgcccagctaatttttttttttttgtagtagagacggggtttcaccatgttagccagaatggtcttgatctcctgaccgcgtgagccacccatctcggcctcccaaagtgctgggattacaggcatgagccaccgcgcccagcctatatctttttatttatggcaaatattttaactgtcccacagatttgtcttgaataagaagcaaagagacgggaaaaccccttagaaacaggtgtgtaatgggacttttcttttgtttcagttttggttaagggcttcgtgctgaggtactgtggctctctctagagacagctgaatgtctgctgagttagaaaaggggagacttccccaaaccgtctatgaacccttagcccatcacctgtgttgagggtgtaccgggaagacttgaggattactgaggggaaaatagaggttatggagaaagtttccccttcattgaaaatgcctgggcagggtgcggtggctcacgcctgtaatcccagaactttgggagaccgaggcgggtggatcacctgagattaggagttcgtgaccagcctggccaacgtggtgaaaccccatctctactaaaaatacaaaaaattagctgggcgtggtggtaggcgcatgtaatgccagccacttgggaggctgaggcaaggagaacccaggaggcagagattgcggtgagccaagatcgcgccattgcactccagcctgggcaacaagagtgaaactccatctcaaaaaaaaaaaaaagtttgcaaaaataaaaaaataaaaaataaataaagggccggggacagtggctcactcctataatctcagcactttgggagacacgggctggcagatcccgtgagccaaagagttcaagaccagcctgaacaacatggcgaaaacccgcctctacaaaaaaatacaaaaattagccaggcacagtggttgtgcctgtagtctcagctacttgggaggctgaggtggaggatcacctgagcccaggaggttgaggccaaagtgagcagtgattgtgccactgtatgccagcctgggtaacagagtgagaccctgtctcaaaaataaaataaaataaataaaaattagaagaagaaataattgaaaattctgaaaaacataaaataaaaaaggcagtttccttggagttttctgtgctactgtggacatagcacatagtaggtgcttaatccatacttaatgatttatgtcaggtgctagtctaggtactagaccccctgtgagcctaatggggatgacaggtcacaaggaagtaaatttgaaaaagaaacaacattgtgctaagtgaaagaagccagtcataaaatgccacagattttattccacttacatgaaatgttcagaatccgtaaatccatagagacagaaaataaagtaatgactgccaggggatggggcagcagggagtgactgctgataggtgcagaggttcttgttggggtgccagaaatgtttgggaatcagacagttgtgatggttgcataacatagtgaatacactaaaacccactgaattgcacatgttaaaatgaagtttttgttatatgagttgtatttcaatatttatttaatttaatttaattaattaatttattttttgagacagtcttactctgtcacccagactggaatgcggtggtacgatctcggctcattgcaatctccacctcccaagttcaagtgattctcgtgcttcagcctcccaagcagctgggattacaggtgtgcaccaatacgcccggctaatttttgtatttgtagtagagatggggttttgccatgttggccaggttggtctcgaactcctgacctcaaatgatccgcctgctttggcctctcaaagtgttgggatcacaggcatgagccatggtgcctgggccatatttcaataataatttcaaatatgtttttttaaaaaggacaaaacagagtaacttcacataataggtaccacgaggacaagagagtgaaatgctggaagatgcagtggctggctggggcaggtgggagacggcctcagtcagggtgcttccattgtatgggatctgaattatgactaggaggcagctctatgtatatctagaaggtgatagacaaaggaacagcaagtgcaaaggtcctgagctggggaggagcatggcatgttcaaggagcagataagtgagttgggatgcaggggaaaagggacaagagaccccttcagggaaagggagctgaccaaacagggccttgcagactgccaagaggagtttgggttttgtttgcagtaaaatggggagccgtgggatgattttgagcagaagagtaacatgatctgatacatacttcaaaaagactgcttgggccaggcaccatggctcatgtctataatcccagcactttgggaggctgaggtgggagaatcacttgattgagcccaggagttcaagatcagcctaggcaacatagcaagaccccgtttctacaaaaaataaaataaaacaaaaaattagccaggaacggtggcacgtgcctgtaatcccagttacttgggaggctgaggtaggaggatggcttgagccagagaggttgaggctccagggagctgtgatcccacaactgcactgtagcctggggacagaatgagaccctgtctctcaaaaaaaaaaaaaaaaaaaaaaaaaagactgcttgcactgtcattgtaaggtaaatacagctacagacatacagatattttggtcaaagatagaccacaaatacaatggtggtgtcatgaggttataatatggtacttttactgtgccttttttgtgtttagatatgtttagacacacaaaaacttgccattgtgttaccattgcctgcagtacccagtacagtaacatgccgtacgggtgtgtagcctacgagcaataggccataccataaaagcctgggtgtgtcataggcaacaccatctgggtttgaagaagtctgctctaggatgttcgcacatcaagatcgcctgaccacacgtttctcacaatggattcctgtccttaggtgatgcatgactgtggtaggcaggtaggagtagaagcagaaaatgtaagtaaatccgtttgacactgtgcttgtgacctgcaacactcagtaactgccagtcatctttcataaactagaaacaagccagcttgtcatatttatttcaatacagaaagtcaaggccgtgggtattttgatctttctgtcttgatgctgcctcacctccctgttctgagtcaccagccctgtggattcttcctcctccaccctcacccgctttgtgtcctccacactgtccccaccctaagacctgatgaccgatagaaacacttgcatccttggcttaccttttttctttccccctttaaaaaatatcatagttttggctgggtgcagtggctcacgcctgtcattccagcactctgggaggccgaggcaggaggatcacttgcacccagaagtctgaggccagcctgggcaacatagtgagatcctgtctctatttttattttgtatttatttatttatttatttatttttgagacggagtctcactgtattgccaggctggagtgcagtggcatgatctcggctcattgcaacctctgcctcccggattcaaacaattctcctgcctcagcctcccgagtagctgggactacaggtgcacaccaccatgcccggctaatttttgtatttttagtggagacggggtttcaacatgttggccaggatggtctcaatctcttgacctcatgatgcacctgctgcagcctcccaaagtgctgggattacaggcgtgagccaccgcacctcgcctattttaattttttaaaaaaaatcatattttagtacctgtagtcccagctacttgggaggctgaggcaggagaattgcttgaatctgggaggcagaggtttcagtgagccaagatcacgccactgcactccagcctggcaatagagcgagactccatctcaaaaataaataaataaatacaaaataaaaatagagacagtgtgtcactatgttgcccaggctggcctcagactcctgggtgcaagtgatcctcctgcctcggcctcccaaagtgctggaatgacaggcgtgagccactgcacccagccaaaactatgatattttttaaagggggaaagaaaaaaggtaagccaaggatgcaagtgtttctatcggtcatcaggtcttagggtggggacagtgtggaggacacaaagcgggtgagggtggaggaggaagaatccatagggctggtgactcagaacagggaggtgaggcagcatcaagacagaaagatcaaaatacccacggccttgactttctgtattgaaataaatatgacaagctggtctgtttctagtttatgaaagatgactggcagtcactgagtgttgcaggtcacaagcacagtgtcaaagggatttacttacatttcaaatgacgtgtcatttgcagaaaaaaaatattaaaaatacaaataagcaaaaggaaaaacaatatccatgacccacaattgagaaataaccattatcgaaacaatatttcaatatgttactcctgtccttttttgtttcttggtttaaattttatttgtattgaggtcatacatgcacataagttgaagagtcaaattttctaaaaataggaatccccacttcactctctcctctcatttctgcctccccaaagataatcactttgagctgattttttgggtatttaactccatgtcttggaataacatgcttctatcgccacttcttagtttttctgttttcagtaaaatctgctttcccactctgggcaataagggttctgccctctttccctctcctcacctgcccagcccatgcagagacccttcccatcctttattctctcaatatagttatatggttattcttgtgagattgacatttacagtatacattattgtgactatgtaaatgccattcacagctgagctccgtggtaaactatgatgacctttacttttctccttttctgcaacttttcatttttcttttccttttttttttcttttgagatggagtcgccctctgtcgcccaggctggagtgcagtggtgcgatctaggctcaaggcaacctccacctcccaggttcaagtgattcttctgcctcagcctcccaagtagttgagattacaggtgtgtgccaccacgcccggccaaaactatgatttttttttaaagggagaaagaaaaaaagtaagccaaggaagcaagtgtttctatcggtcaccaagtcttagggtggggacagtggggaggacacaaggcaggtgagggtgaagaaggttttgaactcctgacctcgggtgatctacccacctcggcctcccaaagtgctgggattacagctgtgagtcaccatgcatggcctggaatctggatttttttcacaaactttctcagagaattacacctgactccactgaattctacaagcccagattttctatttttgcttagtaattctagtgcctgttacgtgctaagtggccagggccagattaaaatgttagcatccaaaggtattaaagaaattatgccccactcgttcccatgtataaatcaatatgaaatgataataaatagcaaaaatacatgaagagggctgggtgtggtggctcacgcctgtagtcccagcactacgggaggccaaggcgagcagatcacctgaggtcgggagttcgagaccagcctgaccaatgtggagaaaccccatctgtactaaaaatacaaaattagccgggtgtggtggcacatgcctgtaatcccagctactcgggaggctgaggcaggagaatcacttgaacccaggaggtggaggttgcagtgagccgagattgtgccattgcactccagcctgggcaacaagagtgaaactccgtctcaaaaaaagaaaaaaaaaaatacatgaggagaagtccaacagatcttatttttcctatggcgtggtgggtaggataatggccctccaaagatggccacgtgctaattgctggtccctgtgaatatgttacagggcaaggacgaattaagattgcagatggaaatagggtgctaatcagctgactttgagacgggcagattattctgattatgtaggtgggtccaatgtagtcagaagggtcctaataagagaaagaggggctgggcacagtggctcatgcctgtaatccaagcactttgggaggccaaggtgggtggatcacctgaggtcaggagttcaagaccagcctggccaacatggtgaaaccccatctctactaaaactacaaaaatgagctggtgtggtggcgggcacctgtaaccccatctacttgggaggctgagatgggaatcgcttgaaccccggaggcggaggttgtagtgagccgagatcatgccactgcacttgagcatgggcgacagagcaagactcagtctcaaaaaaaaaaaaaaggggggggtggaggggaagaggaagaggaagacaagagagtcagaatcagaagcagagcatggggtgaggcagtccttggctttaaaaatagcgagtggaccatgagacatgggatgcaagcagactctaggagctggaaaaggcaagaaagtttattctcccgtagggcctccagaatgaatgtgaccctgccaacaccttgattttagcccagtgaaaatctttatcttctaacctacagaactataagataattcatttgtgttgttttaagccaattccttgccataaagctcttaaaatatatccccttttggttctgcttctctgattgaatcctgactgatatacatggtaaccaatttgattccctgtttaataaaagcattaaagatcaaattcttagccaggcacagtggctcatgcctgttatcccagcactttgggaggctgaggcaggtggatcacttgaggtcaggagtttgagaccagcctggccaatatggcgaaaccccgtctctactaaaaatacaaaaattagctgggcatggtggcacacgcctgtaattccagctacttgggaggctgaagcaggaatcgcttgaacccaggaggcagaggttgcagtaagccgagatcgtgccactgcactccagcctgagtgacagagtgagactccatcttaaaatacaacaacaggccaggcctggtggctcatgcctgtaatcccagcacttggggaggccaaggcaggcggatcacgagatcaagagattgagaccatgctggccaacatggtgaaaccctatctccactaaaaatacaaaaattagcagggcatggtggcacatacctgtagtctcagctacttgggaggctgaggcaggagaattgcttgaacctgggaggtgcaggttgtaatgagccgagatcgtgccattgcactccagcctgggtgacagacactccatctcaaaaaaaaaaaaaaaaaaaaatccaaagaagaatggtatttcatgacatgtgaaagtaatgcaaaattcaaatttcagtatccataaagttttgttggaacacagctatgcctatttatattatttatgctgcatgcaaactacagagttgatttgttgctacagagatagtaaggcccacaaagccttcagtatttactgtctgactctttacagagactggtcagggagggcttccctgaggaggggacatttaagctgagacatgaataacaagaagactggagatagcgggcagagctgtctaggcagagacaatggagagcaaaggcagttttctctctaatcttgtaacagtcttctaaagagaagcgttattaaagaaaaaaagaaaaaaaaattgagggggccctgaggctctgagggtgctgtagcctctcagggtcacggagactgtaggtcctgaggaggggttgggaaccagcactgtctggcaccagaatttgtggtgccttatgctgcctccttctcggcctgacacagcattggagcccagaaactgcatgttgaatggctttattcaccttcctcggggaaggaccagggattttagattcattctcaggaataggtgagaagagccaaagactcacccatgggcatgagagaatgttctctgcagcctcatggttagtggtaggcccagaggaggccaagggcagtaggcaagacaacggatagagaagagtagtgaattccagctatgtggagtttccagcttggcgaattccagccatgtggggtttattggtgctggtagaaaatggtagcctcaagccctcagttgacaagtgtggccagagagaaccccactctcaatcctttgtagaccaggtcattcccgccaggctctgtgctaacggaggagagtaggttattagtcccatttaagagccagagaaattaaggcagtggagagtagcagggctactggtttaaaaacactggctctgtgcctgaatcccagccttgtcatttgctagctgtgggaccgcaggcaagtgccttgatttctctatgtctgtggataatgatggtatctacctcaaagctatgtaaagaattaaggaaacaatagcccaacaccacacctgcaggaaggaagcaagtttattattactcaataaacattggtggatcctgatgacattctctcagtcagctttagcagtcttaagagactgcagaggatggagaacccaaggttagagccagatttcttctctacccagttcctcggggccaaaaccctgacaccatgcttaactcctcttttatacgccatagtccgtcagcaaaccttgtcttcagtatgcgtccaggagtccaaccattcctgccacctccaccgtattactttcatccagactgccatcagctgtcacctagattattgcaaaagcctccttgctggctttggggcttccatcctctctctctcgccaatccccagtcaactcccaacaggcagcaaagcttaggttacttctcagttcaaaacccttctaggtgtgctagaattaactgatttatttactcaatgattatttattattgagtgtctactatgtgccaggtactgttgtaggcattgcagataaaatggagaacaaaacagacaaaaatttctgcattcatgaagcttccgttctcatggagggagatggttaacaaacaagtgtatgagtaaaacatatggtaggttaggtgtcatgtggaaaaatagtttagggaaggcggggggccttggattttaagtagggtggtcaaggaggtctaacacacaagataagggttaaataaaaggccaaacgtaggagaggtgggagccaaagagctacccagaagaagagcattctagataaaggctcagtaagtgcaacggtggaagtattcctggtgagtctgggacaatagtggaaagtcaaagtgtgtgggaggggagatatagagccccatgcccccctcccacacacttcagaggggaaaagggggcaggattgagtcctgtacattccccacgttttttttttctctggagattggaagccattggagggtctaagcagaggagtgatgagttaagctgctgtgtggaagtccgtaaggaacaggggtgagtcagagaccctgaatggagccgttgcaattatccagatgagatagagtgccttggatcaggaagggaggtagcaacagaagcggccaataaagttcaaagtcctcagccccagtcctcccgatgggggtctcacctacccctctcacctcaccttgttcctccctgcatccccaccccaccggtcactgctaggcacatagaagcatctactaagcatgtggtgaatcaatgaaccccttaatgaatggtccacccctagatcatcagcatcctttttaacgctaggcatatagtctgaactcaacacatgtttacagatggaatgctgcacagtcctgccaagtccaggcggttattcctctccacagccgaaggaaactaaggctcgggtggggaagtgtccccctggggtctctccgcttaggctgcaggctgggcatcctttttcaaactcttttagcacagcgaagtcgagggcactgggtggagggtgcttgcttgccctcagggtgagtcacagtgacctcagaggagtttccccaaaacgtccccgccctgtgatggggaaaagccggaatctctcggtcccaggtggtcatgtggcccaggccggacaagcgtcccgaaagccccgggagagactaagaagcaatcctcccacgcgctttctcccaccctcgggccactgagacggagggacagagggccgccctcgcgcggccgaggccccgcctcccgctcgcccgcccgcgcctccagcggaagccggaagcaaaagcgggtcctgctagccccgcggctccgaactcggtggtcctggaagctccgcaggatgggggagaagatggcggaagaggagtgagtgggctttttcccgggcggcggaggcggcggggctgggccccggcgggtgacagcgagcgcctcaggccgccctccggccccggaaggcggagcttcttttgctggttggccaggactgaccaagccggtgcctacgaggagggcgggatgggcgggcctgggcccaggtgggccttgctttcccctggagatcggtccctcgagctgggaatctactgcccagcgcaggcccggagagctgtcttgcggaaaatacaaaccatatttactttcccagttttcggtaatctcatggttactgagccctcttccgcctcctccaggaagtcgtccgggttctccacacccacctcctacgtagccagtcgcctcctgtataacgatcagttttcatgtctttctccttcactaagtttcatttagtcattaactgttagccatctactcaattccaggccctgggcaggtggtaggaaaggaggccgaccaggagccgctctctgggagcttccattctagtgggaaaagaagaccataattagtcaaggtggtttcagatcgtgattaattaacgttatttgtgcctagtgttccattattggaacgctaagcatgtgggagttatttatatcctactgctcaaggtcatcgccaaggtctgatttttctcacgtctgcagttctaaaaattgcaacctctggcatgaatgggttaagtgttctgaaggaagcaaaatagagttaaggttggggagtccactcaggaaaaagtgacattcagcagaaacttgaatgaccagaatgagggataggagaaataacatcaggttcaaaaggcctggctcaagaaagagtttagtgcttttgagtgacaggcagcatggctggtgtgtagagaggaagggggttagctggacaaggggagatggggaaggacgggctgtgtcctccaggtacttttgggcaagtccaaaagtcatctccatacctgcagggcagagtctgttgcagattgtagatgccctatcactgtttgtggaatgagtatgtgaagatgaataaggaaccccttcattgatactggagtccttcacctgataacttttcaaatatatttcttggccatgtgggggtcatttcatgtaatcagttatttattgagcagctgctccatcccagacactaaacagcctcagcagcacaaaataaaagaggcaatatagcccagcgatttcaagtttgggttttcagcttgattctgccactaactgagatgttggtgaagttttgcaacctccctgagccttagttatgcatgagtaaaaaacggaaagtaatcatacccaatcagacatgttatacctattaaatgagaggtagtgtgttacctagttcctggaataaagcagtgctcagaaaataataacttttgtagtcacagtaacagttattatagcaatattgtactagttcacaatcccagcacagtgtgaaagagctgtgggaacatacgcagtggagtgggtaaattcgggtgtggtaagatggggtaataggaggtgacatttgagccgtttgaaatctgagagggattttgtaaagtagggtagggcatgcccagatcaacaactgggcaaattgaggtggcttcttcaacttgcagaaataatgccaggaaaataatgtaaattggagaaacaaaggtgctaagtaaacagtgttggaccttggaaagtgatgagactccagtttgcctccctttaaatcccccagtatttgccaaagagcaggcagcatttcatttctatactagctctgattccctaccgttcttgtcctctaagtggctgtattcaaaagcaccagaggccactggtacccttgtgctgtgcaggcagggattttcttagtaagtttctctcgaaggcctgcctgttaaagacttctgaatcccataaagttcttggacagcttctctttctggtgtgaggtgtgtgaattgatgttttgggacccttttccattatctaattatgctttctatgtcctccaggaggttccccaatacaactcatgagggtttcaatgtcaccctccacaccaccctggttgtcacgacgaaactggtgctcccgacccctggcaagcccatcctccccgtgcagacaggggagcaggcccagcaagaggagcagtccagcggcatgaccattttcttcagcctccttgtcctaggtgaatatggacactgtcatccccatcatctgccatcccgtgtctgtgtgctcggtctgtgtgtttaaccctgtcactcctcttgactgtcaagtcttcctcccatttggttttcatatcaaacactgagggaacatgatcagtttataacatcattaacaggaaactctcttctttataaaatcatggtgcttagcaagttctgaagagctgttgatgtaatatcttggcctttgaaagaaggattaaaaaaattttggcctagaaagaatcttgaggcctggcgcggtggctcaagcctgacatctcagcactttgggagacttgggtggatcacttgaggttaggagttcaagaccagcctggccaacatggtgaaactctgtcttcactaaaaatacaaaaattagctaggcgtagtggtgtatgcctgtaatcacagctactcaggaggctgaggcacgagaatcacttgaacctgagaggcagaggttgcagtgagccgagatcacgccgctgcactccagcctggatgacagagtaagactgtctggaaaaaaaaaaaagaatcttgaacatctagtttaatggatttcaagttctactcaaaggagtatgcacctgtgcaggggatgaaggagcagggggtggggtggcaggaggtgggaggagtcagatgggagaatatctgaccccctgctcctggcttcaatcagagcagcattttgtgttcatatttatttgacttccatgtgaattttatttaatggttttgctgctgattgaaagagcagaaacccttgccccagcaccctgttttccttaacctctgtcattctcattaaccatggtcatgacttttgccatatctatgtaccacctgtattgttaatttagttatgtactatttttgattaaatgcattcactctctgaaaacctcattttgggccgagtttggtggctcatgctggtaataccaacactttgggaggccaaggcagatggatcacttgaggtcaggagttccagaccagcctggccaacatggtgaaaccctgtctctactgaaattacaaaaattagctgggcgtggtggtatgtgcctgtaatccccgctactcaggaggctgaggcaggagaattgcttgaacctgggaggcggaggctgcggtgagccaagatcgtgccactgtactgtagcctgggcgacagagtgagacactgtcttaaaaaaaaaaaacaaaaaaaaccaaaaaactaattttgttcaaccttctcttttagtgtgtgaggaaatttcagcatagagaagtcaggtggttgtcataccaggctgatataagactagagactgataaccaggttaccagataccagtcgagaggtttagataaaagacaaaaacttaaatgcctcccagtgtgcctccatctcaaaaaacaaacaaacaaacagacaaaaaagaaatccagttgaaactacacaaccacttttgattagctaaggaataaatagctttgagtttgacccaagttcaaattcttttttttttcttgagatggagtcttgctctgtcgcccaggctggagtgcagtggcattatctcggctcactgcaagctctgcctcccgggttcacgccgttctcctgcctcagcctcccaagtagctgggactacaggtgcctgccaccatgcccagctaattttttgtatttttagtagagttggcatttcattctgttggccaggatggtctcaatctcctgacctcgtgatccacctgcctcggcctcccaaagtgctgggattacaggcgtgagccaccacgcccagccaagtccaaattcttgtttggccgggcgccgtggctcacacctataatcccagcactttcgcgtggatcatctaaggtcaggagttcgagaccagcctggccaacacgatgactccatctctactaaaaatacaaaaaattttagccagacgtggtggcgggcacctgtaatctcagctactcgggaggctgaagcaggagaatcacttgaacccgggaggcagaggttgcagtaagccgagatcgcgccactgcactccagcctgagtgacaagagggaaactccataccccacccccccaaaaaaacaaaaacaaattcttgtttgaaagtgaaacaagcatttcatttgctgcttttctttaatgataccaaagtcatactcctaatgagattaggtcttttcagaaagttaaaaggtgcaactgtttttttttttttttttatttctctgatgtgtattaggactgtttattaaggaaaagtataacttctcttacatttatattctgtctctggtgagtggacaaagaattttaataatacacttgaggccagcgatttgagaccagcctgggcaacatagtgagactctgtctccacaaaaaataaaagattttaataatacggtctttttatttgaaatcctaggactcatccttgtctgtcatagttttagaaacttataaaccgatactgaaaaagtacacagaccagaagtatacaatgtctcatatagatttaatacaccctggtaattttttaccctgtaaatgtagttgaattctatttctaggggattacttcaacaatgaaggactctcttttgttttattttctttttcttttgtgatagtagtcgaagacaaagaagaaaagcatttcttttcttgattaagaaatctttagtagctgaagtcttccttcaggattaaggagtattattaatctatttacactgctgtcaatttgatatgttagacaatataaaaggcgggcctggaaaaaaaaaacttttgtaatcactttttttttaagggaaattgaaaagtataatatgacttttaaagtaacttccagggcgtggagcatttaagattagctgaacaaaagaccacaaaacaggtttctataatgtactttttaaaccaggcaaaatcctgcccagtgttaatacatctttggggccagaaaggctgaacttgctgtatatttctcttggattgccctctccaaacagattataaacctagactctagagtcacaccaatgttagatggctttcattttcacctaatcagattcttgatagtttatgagttagtgtctctgcttatgtggaggttagcatgtattaccaaaacagaatgatgctttctttttaagtaaatttaaggcattgtttgcctgttgcatgttattttatttctgattagatatccaaacattgaatttttttttttttttttttttttccccctgagatggaatcttgttctgttgcccaggctggagtgcagtggcatgatctcacctcactgcaacttctgcctcccgggttcaagtgattctcctgcctcagcctcccaagtagctggggttacaggtgcctgccaccacacccagctaatttttgtatttttagtagagatggggtttcgccatgttggccaggctagtcttgaactcttgacctcagatgatccacctgcctcagcctcccaaagtgctgggattataggcatgagccaccacacccagttcaaacaatgtaaatctgatggtgttttaaaaattgctgttattaggtaacttgctaattcatgaataaatgaactcaagtgaattaagggaaattagcccatagtttattctagacctcagaactcctgacctggaattcatttgccactttttgttactcttttagttaattcaaatgaaatggtaacttttgtgtcctgtaagcacatgacaggattacagtgtgttcctctttgttgagaagggatgacaaaactctgtagttacttttgatttttagaagcttgaaatcagttgacttgcatttaaccgttgttgatctttgactccacaagaaaaaatggggaatcattgttatttacttacactagattaacaattaacattatttgacacatacattttatgggccttgaaacttaatggagttattatgattgatatgtgttttatatattttccatagtcattactccaggcatgaaaaattgaaagcacaccctccataccacacagaagtgtttgccctttcttgctcggtttttttccaagtgtacttgaaaacgtgcttgtttttgcatatacagatgtatattcgtaagtacatgcagaaacacaaataatacatgtttggagttgcaaatttgttttgacataaatggggtcccataacttgccttttcatctcacagaatgtcttggagatcattgtattggtgttttttctgtctacctcattcttttttttttgtagtaaatacataacatacatttacaattttaaccactttaaaatgtacagttcagcagcatctagtacattcacaatgttgtgcagctatcactactatctagtttcagaacattttcatcaccccaaaagaaaaccattaaaagcagtcattccccatccctcccttttctagtccttggcaaccactattctgctttctgtctctaggaatttgcctatttagaatatttcatataaatgaaaccatataatacgtggccttttgtgtctggtttctattacttagcataatgttctcaagattcatgttatagcatatgttagaattgcattcctttttatggctgagtaatattccactgtatggatatgccacatgatgtttattcattcatcagtgaacatttggattgtttctaccttttggctgttgtgaatactgctgctgtgaacatttgtgtataggcttttgtgtggataaatgtttttatttcttttggatatatacctgcaagtggaattgccgagtcaaacggttactgtatgtttaactttctcagaaactgacaaatgttttccacaggggctgcaccattttacaagggttccggtttctccatgttcttgcgaacacttgttttctggttttaaaaaaatgatagactgggcgtggtggctcatacctgcaatctcagcactttgggaggctgaggcgggaagatcacttgaggccaggagttcgagaccagcctggcaatatggcgaaaccctgtctctcctaaaaatacaaaaaaattagctgggtgtgggcgtggtggcatacacctataatcccagctattcgggaggctgaggcactagaatcatttgaacctgggaggtggaggtttcagtgagctgagattgcaccactgcactccagcctgggtgacagagtgagactctgtctcggggaaaaaaaaaattatagctatcctagtggatatgaaattgtatttttgttttgttttgttttttttgagatggaatcttgctctgtctcccaggctagagtgcagtggcatgatcttggctcactgcaacctctacctcctgggttcaagtgattctcctgtctcagcctcccatatagctgggattcaggtgcgcaccaccacaccctgctaatttttgtatttttagtagagacggcgtttcaccatgttggccaggctggtcttgaactccgacctcaggtgatctgcttgcctcagcctcccaaagtgctgggattccaggtgtgagccaccgcaccaggccctcactgtattttttaaaaaatcttacatgtccttccagtgaatcattgtattttgattttagtttcccttgtgactattgatgttgaacatcttttgtctattcatgtcctatgcccgtttaaaagctgtggtgtttgtctcttggctgttgagtttaagagttctttatatattgtggatagtacacctttatcagatatatgatttgcaaatattttctccccttctatggattgtcttttctgactttattctttttaatggctgaaggctgttacctggcattgatgagccttatattaactctttctgttaatagtttccccttttgctcttaaagccgcaaagagttgtttgatctatttatgagaataacttaaatttttaaaaatctagcttggtacaaaggaagagcagaaactggttcaactctcttggtctattttctgtccacttatgtgcttatttgccgttttttgttttgtctagacattgggcatgttcattagtcacatgttatgtttatgcactggaacttttttcttgccattagtatttaatgtaggatttctaactaggttaaatatttatataaaaataacaccacagattgatagtttaaagcacagaatgaaaagaggacaaaatgtctacatttacaacactctggccacctggtgttttttggtgggattaaagaaacctaatttgtcagtgcagcctctgagggtgaccagttaacaggcatgtggattgtttaaacatttccttgaaaaaaataacaaaattaatgttagtcctgttaatactgtggttgatgagctggtataccatctaggtgcccagtaaaagaaagacatgcacgctaacatttggattaggaaattacattcaggaataatttttgtgaagtacccattttttttgccggggggttggtgggggcagaaatatccctttcaaatcgttttattttacatcttcttattttctttcataacaacacctctgtgaggaaagttagacattattctgttttggagattgaggaatgaaggcatccagccaagtgggaggtggtggggtatgctgtggttaagagcacagatttggaatctgactcaatactgcagcacctaccagtggtgtgacaggggctgtgatgtctagaagcctcagttttctgatttgtaatcagagaagatagtggtaatgacagctaattccgagggaagttggaggattaaatgagagagtatttggggtgttcagcctagttcatggctcatgggaagtcctcagccgatgggaatggcaggacacagctgcacccagctggggagcaggagtgttccatattcagatctctgatgttcttgtcaccaaaccatttactttttcctgtttgtaaaacccttacttccctctatgttaagagccagtcacatgatggcaaaataatttgtgtcaatgcaatctgttgcagttacatttatgtaaaagtgattgatttcattgacttcctcttcaccatatagtgttccagttgataatcacttccaaaaagttgaagaccatttctcagaatcagaaaaatttgaataattttaaataattttataaggtttaacagcttatataaaaaaataggtttctggctgatcaccgtggctcacgcctgtaatcccagcactttgggaggccaaggtgagtggattgcttgagcccaagagttggagaccagcctgtgcaatgtggcgaaaccccatctctactaaaaatacaaaaaaattagttgggtgtggtgtcatgtgtctctagtcccagctacttgggaggctgagatgggagaatcacctgagcctgggaagttgagactgcagtgaccctagatcataccactgcactctagcctggatgacacagtgagaccctgtctcaaaaaagttagatttctgttcctcttccaataactactgggaaacaaactagttcaggcagacaaagaagtatagagaaaatataataaacattgtaaatgtacctccagtttaagaaatgagacacgaaaaacaccgctgaagttcactgtgttattccaattgtccatttctgtgaggacccccccagaaataaccactgacttgaacttggtgtttatcattcagaattgagtgttttttttaaaacattgtattatttttttttccacagctatctgcatcatattggtgcatttactgatccgatacagattacatttcttgccagagagtgttgctgttgtttctttaggtaagtgtgtattggtgattccataataaaagcagtaacaataactaccattttttgagtgcctctttagtgccaggaaccacaagagatgcatcacatccctgatctcatttgatcctcactgcaacctgccctaagggtgctatgatcccattttacagatgaggacactggggctcaagaagggtagtgacctcctaaaggtcatgtagaagcccaaaggccatacagctctgtacagctcaaaggccctttcttagccttttgcttctggtagaactacccttggggaacattgacctctactgctaggctaggctgacatccaactcaactaaggtaagtaatgacacttcatagaatcactcaattttatagacagaagggactctgactttacagtttaggaggaagaaatggctcacttaatgccagagtcaggtctaaagtcttcagagagcattgtgctctaccccacttacatttctgttttgtttcctgtgccaattaactgttgagatctagttgcagtgaatgaacccgtgtaataacaggtgtgaatgcacacacaagttcattgaagtggttagtgaaggaagaagtggggaatttccgtaagtgtaagttcaaggctaaaatgtgggtggagacatgtaaggcacagtaaataaagtcttactaaggtcagccaaagctttttatcagtttattatattgcagtcacttttactagtttctacttgcctactgatggtatttaatttttcctgatcactgctgatgtttagaaattaactttcattgcctggtagatctttagtggagtagtaattctttcacaagatagttattgtttagattagctttggaaatgattgtttagactctgttcactagcctccccctcctcccatcaccccagcagtcctactaccttggttcagactctcctgtattttccctggacttcagtactaagtgccagatcctggcttgtgaggcttcacattgtcatctatctcatttatgccttatgacctccaggtgatgccgtattttaaggaatgggcaccactggatagtgttgacctcgagtacaggtttcaaaaccagttttactcaaaaagttcttgttctgtttttagcatgttttttagcaatatatcttggtagattctaacaaccttagctagtaagatagtcatagagctctaagaataggagccttgctcattaacattcctttctgctattaggcatattgaaaagaacctatgtgactaatacccataattctgggacattcggtaaaggctctaagaactactccaaggaatttacagttgtgtggtcagttttatagcttcttacataaatttgttatcaaaattatagttggtgtgtatttagatattatacacatgaaaattaaaatgataattcttataatttcatttggaatttcaagctcctcatgtttcttgaatgtctgggtaactgcagcttgctgaacaccagtgcttctattaggacttagagcagacattgttggtggcttaccaaagagtcatttcccccttcttccttgaaaatagaaccccaaatttgatcaggtatcttgccacagtgtgctcaaggaagatgggcccctccaagtcaagattggtctttgccatcatgttaatttcactcttctctgccaatgattagttcagaggggtaggggcggcaaggcagtgtgaaacccagttctggccagtgacaccaaggggaagcgtgatgaggtagtgggtcctggaaaatgttttcctctcagatagtaatgagacatttccccttcatttctttgatgctgctgaatgagagtgtgatgcctagtggactggtagccatcttgcaactactgtggctcaaagacaaaagccagaatgctaaggattgccgaggggacagatgggaatcccagattattgatagcattgttgctttgttgagttgatagccctgaaacttcctatcttagtgctaccttttatatgagataataaacatctattagctgttgttgacttggaataaagaaaaaaaaccaaaaccaacatctattgtttaagccatttttagtctaggttcttttacttgcaactaaaagcatcttaactaacatagaactctttccattcaagggacaaaacccaattcaaaagaaaataaattggccaggcgcggtggcttatgcctgtaattctagcactttgggaggctgaggtgggtggatcgcctcaggccaggagttcaagaccagcctggccaacatggtgaaacccctgtctctactaaaaatagaaaaattagctgggcatggtggcaggtgcttgtaatcccagctactctggaggctgaagcaatagaaccacttgagtccaggaggcggaagttgcattgagctccagtcaacgccagggcactccagcctgggtgacagagcaagactctgtctcaaaacaaacaaacaaaaaaaattggtgggggtaggggcgctcacctcttgactcatgtaactggcaaaactacaggtagtattagcttgagacttagctgaatcaggtctcctggacccagttcttctccatgcctcagcagtgaatcccttttccccggcttcgctgtcaggcaggctctctccctgtggtactctgatccgttctcagacaggctcttggtgtggtaagcccttaaagcagtaactgcagtgggagagagaacctcctcttctttctggcaccaaaagttgcaggatgaactctgaccacctggcgacctcaactgggagtggggtggaatggtgttgggagtcagccagagctctccatctacaaggttcatttcttcactgatgttgcagaaataattgtagcctgaatagctaggtcttgggagaagtgatggaaaggcagtcttgctttcaatgcttacttgctaactcaggtgactggaaacccaagagcacttccagggagagtgctgaggtccagaaagtactttttaaaaattatgttagaggacatttggttagaatttgtaaatgctgacatagctatcaaagtaattctgtatttcataaagctaaagaaatggaaggaaaacgtttttctccagctggagcaaagtgtaacaaaatattgagatatctaccatttcaagaatttccaactttgtgccaaaaaagaatctagaagaagttgccagagaaagtatggttttcgttctttcagggataaattttcctctcctgccagaagttgctttgtagcttgcagtcatttcgagacattactggtcttttgctttatagttaggtgttcagcattcctaagaaattctcagtatagaaaaggaccatctgcactccaaaagcacatgtcccctccttctaccttactgtatttttaaatgagtgtctgtctggccacttttcattctttataaaaatatagtatcaacctgaagttctaaagagttccttggcccctgttcgaagctttcaggatactttccatactttatggaattctgtagtttgggccttttaaaaactaatttcttttgcacagttaaacaactactatatatagaaaaaagaaaaatcttgtttattgacaattatttttatcttgtttcattctcttccagtccatgtgtagacatgtccgtatgtattagatgcctttgtatagtttaatttgagtttatatcattttttctgttctttccatgtattagttgagttcacatatttatttatttatcttttttttttcagacagagtctccttctttcacccaggctggagtgcaatcacgatcttggcgcactgcaacctccgccccctgggttcaagcgattctcctgcctcagcctcctgagtagctgggattacaggcacataccaccatgcctggctaatttttgtatttttagtggagacagggtttcaccatgtcggccaggctggtctcgaactcctgaccgcaagtgatctgcctgcctcggcttcccaaagtgctgggattacaggcatgaaccactgtgcccggcccatatttatttttttactggctgtgtaatgctgattcatgtatatattttaggctaaaatttgtaaggaatgaaaatgaggctgggtgcagtggctcatgcctgtaatcccagcactttgggaggccgaggcgggcagatcacctgaggtcaagagttcgagaacaacctggccaacatggcgaaaccccatctctactaaaaataacaaaaattagtcaggcatggtggtgcacgcctatagtcccagctattcaggaggatggggcaggagaatcacttgaacttgggaggcagaggttgcagtgagctgagatcgtgccactgcattccagcctgggcaacagatagagactgcatctcgaaaaaaaaaaaaaaagaaaaagaaaatgaaatacttgtaagcgtatggccagcatcctctgttgaataataccaaagacaggagtttcccccaaccccaaaaatcatgctttattttagagtgagaaaaggccagattagggttataagtggagggctgaaagtttgactttcagttgccaaagtttagccttaatactgctgatgattagaaaaactgtgatctaacttacaaactagatttgattgaatcattgggtaaatagaatatacaaaagtgctcccctgtcataactttttaaaccatatttgtgctatttaattctattccttcttgttttctactaaaagattttaatttttttgttttttaaggatagtacttttggccagttacagctcttttagaatttgtcgagcaggctttccagtttttgttggaaagcccccgtacccccaccaaaaaaaaattttttttttttttttttttttttgagatagagtttcacttttgccgcccaggctggagtgcaatggcacgatctcggctcactgcaacctccgtctcccgggttcaagtgattctcctgcctcagcctcccgagtagctgggattataggtgcctgccaccacgcccagctaattttttgtatttttagtagaaacagggtttcaccatgttagccaggctggtcttgaactcctgacatcaggtaatccgcctgcctcggcctcccaaaatgctgggattacaggcgtgagctaatgcaccccgcctaattttatatatatattttttagtagagacggggtttcttcatgttggtcaggctggtcttgaactcccgacctcaggtgatccaccaccttggtctcccaaagtgttggaattacagccgtgagccactgtgcctggccaaaaaattgtttttaattaaaaaaaaaaaaaagggcctggcacagtggctcatgcctgtaatcccagcactttgggaggccgaggtggccggatcaccttgaggtcaggagtttgaaaccagcctggccaacatggcaaaacctcatctctattaaaaatacaaaaattacccaagcatggtggcatatatctgtaatcccagctactcaggaggctgaggcaggagaatcactttactccggtagacggaggttgcagtgagccaagattgtgccactgcactccagcctgggtgacagagtgagactctgtctcaaataaatagtaataataataataataataatgtattaatatattttacacattagcacagtgcatggcacacagtatagatgtgtgtgtgtgtgtatgtatgcatttatttctttttaacacagtgcaaatacataggtgtgtgtgtatgtgtgtatatatagatttttttttttttttgagagagagagaacttgtgctgggattctacactttgtaacctgattattaatacatttgaggatgttttcggtggcccatgcgtcggggatggttggatagtaagatgggggctgtgagttcgctgctcagcaacttgatgtgggggaaactcggctggtatcctccttcaccaggaaagatcgttaatccaccgaaggacttgaagaaacctcatggggctgggcgcggtggctcacgcctgtgatcacagcactttgggaggccaaggtgggcggatcacgaggtcaggagattgagaccatcctggctaacatggtgaaatcccgtctatactaaaaatacaaaaaaaaaaaattagccaggcgtggtggcgggcgtctagtcctagctcctcaggaggctgaggcaggagaatagcatgaacccgggaggtggagcttgcagtgagccgagatcgcaccactgcactccaacctgggcaacagagtgagactccatctcaaaaaaaaaaaagaacctcatggaaagaaatgcttctttgtgaaatttttttggaacataagatcatgcctggattaaagtgaaacagctgaagccatatcatgctcataaagaggaaatgataaagattcacaagggtaaactattccagcaagcggtggatgccgccaaagagtttctcaggagagcccaaagggaaagatcagacgtcatcccacaattctgctgatgacaagaatcggcttaattccagtgaggagagaagcaggccaaactcaggtgatgagaagtgcaaacagcctgtctgaaggaaaagtgaagaagatcatgggagatggaaagaagggggtgtcttcgggctcttcagagacaggctccaaatcccctctgaaaagaatccaagagcaaagtccccagaagcggggtcagcccccaaagaatgagaagaatgtcaccatcgtggagtccggtaccttgaagtggatgatggccggaccagtggctgcatttaaatggcagccgaccagaagcgagcctgttaaagatgcagatcctcatttccatcatttcctgctaagccaaacaagccatctctgtctgttaccaggcaatcacaaagaagttgaaaatatgtgaagaggaaactggttccacctccatccgggcagctgacagcacggccgtgaatggcagcatcacagacaaaaagatgggatttgggggccttggtctcatgagaagtggaatcgtctctaacttgctaaaaatgggtcacacagtgactgtctggaaccgcactgccaagaaacgtgatttgttcatctaggagggggcccgcctgggaagaacccctgctgaagtcctctcaacctgtgacatcactttcgcccgtgtgttggatcccaaggcggccaaggacctggtgctgggccccagtggtatgctgcaagggatctgccctggaaagtgctacgtggacatgtcaacggtggacgctgacatagtcacttagctggcctgggtgattgcgtccaggtcggggggtcgctttccagaagctcccatctcagggaatcagcagctttctaatcacagaatgttggtgatcttagcagctggagacaggggcctataggaggactgcagcagctgcttccaggcgatagggaagacctcctccttcctaggtgaagttggcaacgcagccaagatgatgctgattgtaaacatagtccaagggagcttcatagccatgatcactgaggtgctgaccctggcctaggtgacagatcaggcccagcagacactcttggacatcctcaatcagggacagttggccagcatcttcctagaccagaagtgccaaaataccctgcaaggaaactttaagcctgatttctactgaaatacatgcagaaggatctctgcttagccattgcgctgggcaatgcggtcaactctctgactcccatggcagctgcagccaaccaggtgtacaaaagagccaaggcactggaccagtccaacaatatgtccgctgtgtcctgagcctgcatacactaagccgtcggaccccccacccccagccctctaatctctccgctaactccctcttcctcacatggggtcaggggcctgggactttgctctggaccagcccacctgtctccatttccttttacacagactttgagacttgccatcagcacagcacacagcagcacccttcctttgaggctggtatggaggggatgagtgtcagcaggattggctcatgggaaagctcttgagctgggcactggcctccacacgaggaggtggctgtgtgtgcacgcacacacacgaggaggtggctgtgtacacacacaaacacacacacactctctctctctctctctctctctctctctgtctctctctctctcaccccaggatagaaactgcccagaaacagctgcctggctttttttcttcttccaagcttgtcttatctcaaaccccttccagtcaaggaactagaatcagcaatgagagttggaagccttcccacagcttccccaagagcgaagaggctatagtcatgtccacgtcccccgctgaattctctgcagggagaggacttgggcccagatgagccagaccagactccagacagagggtcccgtggggcccccaaactcaggtgatgagctgagaaagagaaagatgttcatgtctaagtgtccagtgtgcacctagcactccttagacgcctttgtgaactgaaaagagactggcagagtcctgcgaaaatgaggccctggctttccagggagtatggtgagcatctggccttcgctgcctggaagtgacaccccagacaccactgccacagtgggcgcttgccccgccctgggctgttctagtatttggatttgcattccagtccttgggagggggtcctcagggtcattagtgaggagccaagaggagtggggttgggggacactccttcctgtttctgttaggccacagactcttcacctgcctctgaagagctgctctgaccttggtctcctccccgcagtcccacattctccagcctgccctgccaagccccttgcatgcccactgctctctgtcctcccttctccccaccttcctctcatggagacagtatttctttctgtctgtctgtcccttctttggcccagacccagcctgaccaacgataagcatttcttaggctcagctcttgatatggaaatgagtgtcttcactccagccagcatcatggtcttcggtgcttccaggcctggggtctgtcgggggtgaaaagaactggcctgacctacctgaactgactgaccctctggggtgggtctgggacatcctcgaggccctagcatttctccttggataggggaccagagggcgcttgggatgttgcataagaacaggaagtcacccaagggatgtcaatttcttatccctctacatgggttggattttccaaaatcataatttgcagaagaccagcacttatggtggaatgtatattataaggcagccacactggggcagggtccttcccctctccccactcacggctttggccctttcacagattagaacctgagttagaggattgcagaagacgaggtgggagggcagggaagatgcctgtcaggtttttagcacagtttatttcactgggattttgaaacatttctgtttgaacacaaagcctgttctagtcttggcaggacacattctgggggtgggggtggaggaagatgtggtaatgtaaccggttagtcagtgttgtcttaatattgttgacaattctgtaaagttcctttttataaatatttgttaagctgtttcacctttgttttgaaatcctttcctttttttttttggagacagagtctcactctatcacccaggctggagtgcaatggcatggtctcagctcactgcaaccttcccctcccgggtccaagcgattctcccacctcagcctcccaagtagctgggactacaggcacgtgccaccacactccgctaatttttgtatttttagcggagacggggtttcactatgttggccaggctggtctcgaactcctgacctcgtgatccgcccaccttggcctctgaaagtgctgggattacaggtgtgagccgccatgcctagcgtgtccttcccttttaagcagaaaatgtgacacttgtgaaaaagcttgtaagacagcacttccctttttttccctttaaacctttaaatggcaaatctaggtaattaaagttgtgaatttttatttttgctttgtttttaatgaacacttgtctttcagaataggattgtgtgataatgtctaaatggcaaaaacaaaacgtgattttgcacaattaacaaaactactgcaagaaaaataaaacatttcttggtaacaaaaaaaattaatacatttgaaacatttttcatgtaaccttactgaccaggaatacttatattttacagtcataatggtagccctgcagtgcactctgggagtgagcgagcgagcattggcagttcattgtagtagtgtaggcagcctgcagtagtgcagtctcctgtgtctttagcatgatgagatggtaggatgcacccgagccaacgggccagcatccttactggccctaagctctcagaaaagcttcttaaactctctgagcttccctacagtgttcttttgaggattagaagtaattgaaagtgacaaatcctgaaagaagcagctcaacaaataatcattaattgctcctgatcctctgaatgaattgaggggtgtccttaattaggtgtatgcacaaagatcaactaggagcaaaggaaaatgttagaacttgtgtttctatttatttttaacctcactcttttacaatttctatttttttgtgaatatttttaaatataagctgggcgcagtggctcacgcctgtaatcccagcactttgggaggctgagacaggcggatcacctgaggttgggagttcaagaccagcttggccaacatggtgaaactctgtctctgctaaaaatacaaaaattagccgggcgtggtggtgcacgcttgtaatattagcttgtctctctctctctctctctctctctctctctctctctctctctctctatatatatatatatatatatatatatatacacacacacactatgtatatacacacactgtatatacgcactatatgcactatatatacacacagtatatgtatatacacacactatatatacagtgtgtatatatatatatactgtgtatatatatatatactgtatatatatatatactgtgtatatatatatatactgtgtatatatatatactgtgtatatatatatactgtatatatatactgtatatatatatatatactgtatatatatatactgtgtatatatatatatactgtatatatacacacacacactatatatatgccatatataatatctggtggccagttgtgtgaaatacattcattttctctgttgggtagattgatttgacctaactatgagcctcaatctcaagaggtaaagtggtagtttgccaatttaatgctgcacaaaggattatttaagtaataataacaataatatcacattgtattttacagcgcttcctagtacatcataaataataaaaagacgcaggcttgggcaatagaataattactgattttcaaatgtaactgcttcatgtgtgattataaacgaggtaatcatggcattaaggtttggtatacatttagaagggaaaaagaaagttgaggttttagtaaagcagaaaaacactaagctttaaaaatgaagcctgaaaccatggaaagaggtttaacttccctagtaatcaggatgattgctgaatgcaaattgaatcaaatacaaattgaaacattaaagtacaatttcttgcccactatgttggcagaaatgttaacatctgatgattatccagcgcgactgaggatgtgggacgctttcttgtggaagtgtaagtcggtacaaccactttggaggataatttggcaatattttcagagttaaaaatgcttatgctttgtaaacctgccatttgtagtctctggatctgccctagggagatagtctgggtttgtttttttttttgtgaatgtcttccacagggagatactcttaacacagagtggcatgtacaagcatgttcaatgcagcaccactgttaatagcaaacagctggaggcaaccatcagtggggcaatggttcaaaaggttgtgattttaaaaaaaaggtacaatataattcacatatcataaatttcaccatcttaaagtgcacaattcagagttttttagtatattcacagagttgtactaccatcacctctacctaattccagaacattttcattaccccaaaaagaaactcatacccattagcagtcactccccatttccacatttctcccttctcccatcccctggaaaccaccaatctactttctgtctgtgaatttgcctgtcctggacatttcgtataaagaaatagaatcatacaatcggtggtactttttatttggcaacagctttattgagatgtactttgtatgccacacaattcacttttttttttttttttttttttttgagatggagtcttgctctatcacccaggctggagtgcagtgctacaatctcagcttactgcaacctccgcctcctgggttcaagcgattttcctgcctcagcctccccagtagctgtaattacaggtgcccgccatcacgcccaactgctttttttgtatttttagtagagacggggtttcactatgttgaccaggctggtcttgaactcctgacctcagcctcccaaagtgctgggattacaggcatgagccaccatgcccagccaattcacccattttaaatgtacaacaatttttagtatgttcagagtcgtgcagccatcaccacagtcaattttaggacatttttatcacctcaaaaagaaaccacatgccctttagctctcctccctgtccctgggcaaccattactgtccctgtagatttgtctattgtggacatttcatataaatggaatggtaaaatatatggtcttttgtgtctggcttctttcacttggtgtattttcaagattcttccatgttctggcaggtaccagtacttcattccttttcattgctgaataatattacattgtatggatataccacattttgtttactcactcattagttgatagacatttgggttcttcccactttttttttgaaatggagtctaactttgtcacccaggccggagtgcagtggcgcaatctcggcctactgcaaccgccgcctcccaggttccagcgattctcctgcctctcccaagtagctgggactgcaggtgcataccaccatgcgcagataatttttgtatttttagtagagacggggtttcaccatgttgttcaggctggtcttgaactgacctcaagcagtccacccacctgcgcctcccaaagtgctgggattacaggtgtgagccaccacacctggcctctttccaccctgtgactgtttgaaatactgctgttaggaatatctgtgtacaggtttttacatgaacatgttttcagtttctttgagtagaattgctgggtcataaggtaacttttgaggaattgccaaactgttttccatggtggttgccccattttacattcccatcagcaatgagtgcgtgttccaatttctctatatccttgccaacacttatttctcatctttaaaattataactgtgaaaggaagacaaatcttgggaccctaaaatcactaagctaaagggaaaggtcaatctgggagctgcttaggacaaacctgcctcccattctatttctaaaaagatagctactaagataaaaaagttaacatacctccctctcaatttgtacacaagaaaattccttgtggacaaaggacagaactcaaagtcacccctctctttgttgagataaatgcatatctgattgcttcctttggaaaggctaatcagaaactcaaaagaatgaaactgtttgtctcttatttatctgtgacctggaagccccctccctgcttctagttgtcccacctttccagaccaaaccaatgtacatcttacattgttgatagatgtctcatgtctccctaaaatgtataaaacgaagctgtgccccgaccaccttgggcacatgtcgtcaggacctcctgaggctgtgtcaagggtggtcatccttaatgttggcaaaataaacttcctaacttgactgagacttgtctcagatactctggtttacataaccatcctagtaggtatggagtggtatctcattgtagtttttatttgcatttccctaatgatttatgatgttgaacatcttttcatgtgtttctcagccatttgtatatcttcttttccaaaatatctattcaattttttttattatttttattttcattttattttatataatattttgagttggagtctcactctgtccaccaggctggagtgcagtggcatgatctcagctcactgcaacctctgcctcctgggttcaagtgattctcctgcctcagcctcctgaatagctaggattagaggcgcccgccatgcccggctaatttttgtatttttttagtagagactgtatttcactgtgttggccaggctggtctcgaactcctgacctcaggtcatctgcccgcttcagcctcctaacgtgctgggattacaggcatgagccaccacgcctggtcggttctgtgtggcatttttatactatcctgcccagctgttaaaaggaatgaagcaaatctatacataataatccctgactagatctctaagacttaatgttgaacaaaatagcaagtagtaggatgatacattatactaccataaattttatataaataaatacactcaggtgtgccatgcatacacttacacacacacacacaaacactcacaccctggtactgttgagttaaatatatgtaagaggatagagaagggcctgatataatatttcccaaactttccaagatagttggttaccttgggctaggaagagagagaacgaagatgggggtggaagtggggtatgatctaaaggggcttttgtcttatttatgacattttacatagtatccgcatactatttggccaataaaacatgtaaaagctccttaaaatgtaattacaacctgaaaaaataagaacatgggagctgttggggaactgtagcaggagatgggttcaaatccatgctccatgccctctggcaagggaatgtgtattcattgactccttttatagctcagctttattttgtcttgggtccttcctctttttcaaaatagttttattattttttaatactatataacaattcaaatagcatggaggtttataaagtgaaaatgaacttatctcccctcttcacctgaaactacccaccctgaggtagttttagtgcacgtccttttcctgctcagcttctgtgttctggtattgtctcctgcccacccagtaagctgtgcttccatcttctcgttgatggcgaaagctccttcctccatgggaaagtgaagtcttcgttttgaagcatccatggaatggcctgcaggcttgctttgtgtcacctcctacccgagattgtgattgtgtcacctcctaccgagactgtgaactcctaccctacaatgagtaggtctggagttctacttgggcgtctttattttataaaaagttcccatggtgattctggtgaaccaacagagggttaagagtcgtttatctagggagtaacagagcaatcataaattgtgcccatgctgcttctttgagaattatttttggtggccactttataagagtgatgagcctgtcagctttatggaaacatgcctgaacttagatggtctgttttcttccaggaatttcacagaacttttactttaggttattttcagcatttgtgtttttctagctaaatattcaacatggaactgctatttgagtctgagaaagtgatcatggattcttttttgaaaatgatggaaataaacagtacacggcaaacttagcttgtaaactctgcatttcacattgaaaatgggtggatatggtaaaaatgataggcggtaaatcttcaccaggcagagtgtccttgggtcttgctttaaaatacttttcctcccccacagcctgacttttgtatttcattttagtgtgtttgcctgagatgtgagtgagaaattcatgtgatagatgtctcacgtctccctaaaatgtacaaaacgaagctgtgccccaaccaccttgggcacatgtcgtcaggacctcctgaggctgtgtcatgtcttaaatttgagtaatctttctcatatcttaaatttatgttaaagtttacattttctcttgtaggtattctcatgggagcagttataaaaattatagagtttaaaaaactggcgaattggaaggtaggtttgccctttggttgttcttaattttagtaacattgatcattatgctggcttttttgtaattacttggctatcagtggagttatttatattattatgttatatatcccattactttttaatttttttattagatacaggttgatgcctttacatctgagtttttgcaaaagcataagtctcatgctgtttcaagtgaacatgggcgccaatgtcatttttttttgttattatacttgcatttttgtaatcctagactaacctacttttttaggcaggaaaattctctaattagcattaaacattaaatactgtttattgctcccaattccattttgacaactgaggataataaaacatacttgtccagtactgtgagacacagtactttatatattgtagctcatgttattctcatgacagtcatgtgaggtggattgtctgggtattgtaatatcatcacctcgtttttacagatgaaaaaagtgacactcagggagattgggatgtattcagtgtcacagagctagaaagaaagtggccgagtggagtcttgtgtccaaaccctctggcctgaatatgcagtgttttctccaccataccaccccgtcctcagtttgctgatatatatacccttgtgttaaagaggttattagaatatgaacatcatcctggggtgcaagtactcattgaaactggaatttcaacataaacttgagcatccatgttgagtagggcgagattaacaagtatgctacaaaattgattttgtggagggaaataagattcatttcaaaatataaagaattatatggctaaaattgatcacatttaagcccttcctactttgatgaagctcctaggtgctaggattaattgacctgtgaaactgtagagtgtaaaattagcaagacaaaccttatagactaacgtaaaacacaatttgaagctgttataaatagtagtaatgaaatattttatatattaaataaattttgaaaatgtatattgagctctggagagtgataagacacacttctgctggggaggccccactggagcgcattgcatgtgggatctctgccttcctgctacttggttacatttaaccacccaagagtgggtcatgactgaagagcctttttctactcctaggctggatatagcctgatgtgtagattttgcccactaacccattttgtttgatctgatttaaaaatcatttgatcaaggctgggcgttggcggctcatgcctgtaatcccagcattttgagaggccaaggtgggtggatcacctgagctcaggagctcgagaccagcctgggcaacatggtgaaactccgtctctaaaaaaatacaaaaaaaaaaaaagatcaaaatttgaattgactttaaaacaattaaaaattgttagattttgggcgggtgcggtggctcatgcctgtaatcccagaattttgagaggctgagtcacgtggatcatctgaggtcaggagtttgagaccagcctggccaacatggtgaaacctcatctcttctaaaaatacgaaaaagtagctggacgtggtggcacgcacctgtagtcccagctacttgggaggctgaggcaggaggatcgcttgagcccaggaggatcgcttgaggctgcagtgagttataattgcaccactgcagtccagcctgggcaacagagcaagaccctgtctctaaaaaaaaaaaaaaaaaagttggggcaggcttcctggaggagactgcatttgtggagagtcagagtgagaagtaggattcctgcctggaaaccagatgtgcagggagcagtgggaagtcagaaaaacaagaggagctggtggtttctttccctgaagttctgattccaaactgacctgctgggtctgcccaggtagcaacctgtattatcatgtgcttaatatttttctatcaacttgctttttaattatatgtatatatatataaattatttatttatttcttattttctttttttgagacagagtctctcttggttgtccgggctagagtgcagtggcacgatctcggctcactgcaacctctgcctcccgggttcaagtgattctcctgtctcagcctcctgagtagctgggcaggagaacaggcatgtgccaccatgcccagctaatttttgtatttttagtagagacagggtctcaccatgttagccaggctggtctcgaactcctgacctcaagtaatccacccaccttgtcctcccaaagtgctgggagtacaggtgtgagccactgcgcctgggtgtggctaatttttaaaaaaattttttgtagagacacgatgtcactatgctacccaggctgttctcgagctcctgggctcaagtgatcctcccaccttggccttccaaagtgttaggattacaggattgagccacgtggcctatatatttattttattttattttatttttttttttttgctggggagtggtggggagcagagtctcactatgttatccaggctggagtgcaatggcgtggtctcagctcactgcaacctccgcctcccaggttcaagcagttctcctgcctcaacctcctgagtagctagaattacaggtgcctgccaccacgcccggctaatttttgtatttttagtagagatggggtttcaccaaattggccaggctggtctcgagctcctgacctcatgatccatccaccttggcctcccaaagtgctgggattacaggcatgagccaccacgcctggccatgtttattttcaaggcaacattacagtactatttcaattcagaaactaatattgttttgtaaacatgataaaaatgaagtagtacagatgcctgctgaagcatcagaggtcaagtctgctctctgtcaagggagatcagcacgttggagagagcccttagaagcggtattgccatcctaaggtgtcttggatttatttgggcctgaagaaataatcaaaaggggctgactctctcaatccatgaggtcagtggtatttgacacacactgctcaagtgccacctaaaatcacctcagaacattttgggggagccattgccaaaaggaactgtaacactatttccctgaaaggcagtgtgttcataagggctgcagtaacaaattatcacaaactaagtggcctaaaacaacagagatttgttttctcacaattctggaggccagaagtgagaagtcaaggtatcaacaggaccaggttccctcccaaagactctagaaaagaattcttcattgcatcttccagcttctggtggccccggttttccttggcttgtggccgcatcactcctgtctttgtctctgtgctcacatggcattcttctccacgtgtctatgtgccttgttctgtctcttacaagtcgatgtttgctgcctttggccttcccttatccagtgtaaggtcatctagatccttaccttcattagatcttcagagaccctatttccaaataaggtcacactctgaggttcctggtggccatgaattgtgattggggttgggggacactatataaccccactataggtagattctcctttttcctggggtggggggggctagtttttatacctccaaaaggctgtatatagtggtcctgctgcacagatcctgagaataggttgccccgtaaaacacagagctcggctcattttttttcacacagtcccagtctgaatcatgagcttgagcttgttgtacatgctgctattttaagacttaataaggcatttcagaagtcatcatttgcttctattttgagcgttttttgactttcttttagtctttatggtaacagctgtacatttgtaagaatacatttaggcattctttggaataggcattttgacaaaaaatcagactgtcaaaattgtgacatgggaaaatattcatatgaaaaagggcctgattttgcatttttaaatagactgtgtattacacataaccattttgggcttgaggaccaatatatatttccccaaaattctaccaacaactagagagatatattaataatatagaaaatgaaattgttattgtttcacccctccaaagatggctatattctagaaacacctttcgtagtggcacttaataatcaaatctggaagcatggtgctatggtttgggcatttgtctccccaaacctcatgctgaaatttgattccagtgttggaagtgtttgggtcatgggggtggaccctcatggatagactgatgcccttgctgggggagggaggtgaatgagttgttgctctgttcgttccctatacagctggttgttaaaaacagcctggtcccatccccgccccccctttcttcctctcttgccatggatctctgcacactctggctccccttctcttcccccatgagtggaagcagcctaaggttcttatcagatacccagtcttgaacttttccggacagcagaatcatgagccaaataaatgtttttcctttgtaaattacccagcctcaggtattcttttatagcaagacacatggtaaggggctgtctttgtatcaaagtctcaagtcgaaagagcatccagtgtggactgttttatcacatcagactttggaaaatggcagagttgtctgtgataagcagaaagaaggcagagctattttaaccatatataggatttactgttcctctgagtggattgttttagggcttgccattacctttttcctggaggattccaatttgtggagttgtttttgaaagtctgcaaccagaattgaaattttctgtattcagattaattttctttctgtactaaggaataaaaaacatactactgtgttgtgctgtttcttttcactgatcacctttaaaatccttgtcttggccacgcatggtggctcatgcctgtaatcccagcatttggggaagctgaggtgggaggattgcttgaggctaggagtttgagaccagcctgggcaacatagcgggaccctgtatcttaaaaaaaaaaaaaaaaaaaaaaaaaaaaaaattagcccggcatggtagcacgcacatgtagtcccagctactcaggaggctgaagtgagaggatcacttgagcccaggaggttgaggctacagggagctgtgattgcaccactgcacttcagcctggacaacagagcaagaaagactctgtctcaaaataataataataataataatgataaaaataataaaatacagtttcatttttttttttggtgggggaatctctcattctgcttgattttattatcaggtagttatttaaacattatatgtttccactaggccaggccctgagagaataattattttggctctttattgattaatttatttcttaattacacaaattccatgcccttaagatactcattttctatttacaggaagaagaaatgtttcgtccaaacatgtttttcctcctcctgcttccccctattatctttgagtctggatattcattacacaaggtgagactcaggcacacattggtgctttggtctggacagtttctcatgtttgtaaggcaagttccttaaaagcttgggtataatttagcagcagcagcagcagcagctctgctccttcctggttgtgctcagtggaagctggactgcagtgcctgacttctggagaggagcagacatgatgaattggctgctttaatggtttcaggcagtatggctcactgagccagtgtttgccataaatgggtgctttgcccaggaagatggctgaagtgatgttaagtggctcacagatgatgcattgactcgtcttcctggacacagactgatagatgtaaagaggatagactgtgtcctgggacgacggggacatgtgccccaggacttttgtttctttcagctcccccactggggcctttctaaccttctcaggcccatccatccttccatgtctccctctcggtgccctcccctggcctcagaccccagcttgatattccccttcatccctcaacctctatcgctcctcgcccactccctggtccagcttctccttcccaggctggagccccatccttccctgcctagtcccacagttgcctgcccattctttcctccctgccttggtgagcagtggcactggcccctacccacttctctgctttggcttggccttgacggccattgccttgcaactcccagtgtgagatgtttttttttttgttttgttttttttgagatggagtctcactctgtcacccaggctggagtcctgtggcatgatctcggctcactgcaacctccaccttgtgggttcaagtgattcttctgcctcagcctcctgagtagctgggattacaggcacacgccaccttgcccggctaatttttgtcgttttagtagagacggacggggttttaccatgttggccaggctggtctcgaactcctgacctcaagtgatccacccaccttggcttcccaaagtgctggggttacaggcatgagccaccacactcgtcccctagtgtgagtctttctgcctgagcaggagcttctcacttttaagcctgcttgtgtgcgtgcatggttttttccttgtctgtgagttttctttaaacataaatgtatttaagttttaaaataaagtgattcaacttaaaatactagtattaataatacagcagctattttgtgaatgtgatttttaaaaaaactgtgaagattggaaagtttaggccagtccttggagagaggaaagccagagacacaacacagatctaatcatgcgctgccccctacaggtttctttttggtaaagtagaaaccaaaaaccccaaaaccctacctcccagggtgctttgagagtcacactagatgaaagaacgtaggcaaagcaccacccaccacactaaataaatgaagtgctgctgcttgttattaatgataaaaatgtcatttattattaataacaatattaccaccagtagtaataataatttattaagcttaatatggtcgggcccagtggctcatgcctataatcccagcactttgagaggccgaggtgggtggatcacttgaggccaggagttcaagaccagtctggccaacatggtgaaaccccatctctactaaacatacaaaaattagctggtcgtggtggtgcgtgcctgtaatcccagctactctggaggctgaagcatgagaatcatgagaatagcttgaactcgggaggtggagcttgcagtgagctgagatcacgccactgcactccagcctgagtgatagagggagactttgtctcaaaaataaataaataaaaataaacttaatttgttgttgacatggtataaaataaataaatacataattttaaaaaatgagttagatttgtctagaaatgtttggtaaaaacatagaaattaagtctttaattttcctgtactaaaacaaaagcatattaagatgttcagcccagatttttttttaagttattattttattgtgcatctatccaaagaaaaagtgaaaaggaaatttaatgtaaaaaatattcacaagtcttacaaactgttagtgacatcagataatttttaacaaggaaacataagttgaaggtcaccatgtctttcctttcactttgtaaacaaatcttaactgtaagcagatatgaaaatatttcaaaacatgctgaggaaattgacttgattttgacttaaaaacatgacattttgaatattagagcatgtaaagtttttcttttcttttttttttttttttttagaggggagagaaacttgttcaaaatttgaggaaagtaatagttttttagagaaacattttgttgaagatgactttccagcaggaaatgtgacaatttatatgaaagggactgataggattatgaaatgctacttctgaaacttctatccactttctaccctcgcccaaagatgataggaagtaaagtttgaatattttattttaatattatgatatctgctaatgtaaatttggatttagaatacagattacagtaagattatcatcagttgatatgcattagctaggcagcaactggttctttgaattgcaaatattacacaaatcacaggatgttaattatgtcagagagaaacagataaatttgctttatgtagcagagggaagttcttgtattatggtaactttaacttgggtaaatgttcaggatccagattaatattaaccaaatatataaattatatcaacattagatctctgcaaacaggtcaaaactgattaatctgtttttttttttttttttttgagatggagttttgctcttgttgcccaggctggagtgcaatggcacgaactcggctcactgcgaactcggctcactgcaacctcggccccctgggttcaagcgattctcctgcctcagcctcccgagtagctgggattacaggcgtctataaccacaccagctaattttgtatttttagcagagatggggtttctccatgttggtcaggttggtctcgaactcctgaccttagatgatccacccgccttggcctcccaaagtgctgggattacaggtttgagccaccgagcccagtctaatctgtttttaaataacaaaagaaaacagcgatttgcaaagagcaactcatagattgaaagccctttgttttgaaaaaccaaatcattgtgttttaaaattctttgtgcagtaaagattgatatgccaaacaaaggaattgaatgtcagatgataggcagccaagtcaaaattgcagcttctaggaggtgggcttagtggggcagtcagtgttcagctgaggacactctttcacaagtgggctttaaaatagcaggtcttgatgtccatggtttggtgatttctgagctaaaaacaagattcttgttcacaaccacaatcgggggtgatcaaagactcttggtagctcctaagtggagttcatagggttataataaatagcttaatttccttaattttatggaaatttgaaagatgctaccatgctgcttgaacttgaatattttatcttaaacgctgtgaagtatagatagaaacattttatctgacatagttaatgatgatactaatagagtgaagtaaaattgtttaaaagacctggccaggaaaaaggaatatctgatagtgtatcttggtatcctaatagtgtggactttggatgtgaaacacagttaattccttcagtgcctgtctgttgggcatcttccatctgacgggcattatgtcagggaccgtgttgtgcgaaagcaggtggggtcattgcccagaatgagcctgcagcctcatgggaaagtaagacatcagtacataaataagtgcaaaattgcagtcttgtcaaccgctacaagagagggtgactgtgcactgagagcacagactaggatctgggaagagttgaaatgtcctgagatcttgggatgatgaaagcttaacaagcaaagagggagcacaacctgctcgaagccaccagtgggactggaacccagagaacaaaggcgagcatggtgccagatgagcccagaggcctccccaggagtcgaatcattcagggtgggggctagctgcattttaagtggaaataggggtccaggtgaaggcagcacaatcagatttgtcttttgggaagatcattctggaaagacgggagagtggagggaaaggggccctggggggttgaggagacttgtgcgaagctatgcagtgtttcagatgaaagatggtgtgagtgacgggacactgcagtaagtgcgggggtgcaggaagactcccgggctcccagcttgccacacaggttgggcagtggtgccttttacagagaatcaagtctgcacggagggccaggtgtgcaggccgtgccttcactgacaggaatggcttttctaatcatttccctgatttctgctctttcaaacagggtaacttctttcaaaatattggttccatcaccctgtttgctgtttttgggacggcaatctccgcttttgtagtaggtggaggaatttattttctgggtcaggtaagaaaatcatctttgaaacactttgaaagtcttacattcttagagctagtgcagggaggtgggaaggtgaaatggggccactttgtggggcctgggtttcacccttaaggtaaattccttctggaaggaaatcctagcttcatatgaggcacagtagaggcgtgctaaattgtttcaaagtgtcctccaagacctttggtatctggaattgagtaaaacttttccataatcccccccaaagtatttgagtttatttgcaaaccaatactgtcttaaattagaatacctaaaaatgaagccaaatatatgccatcaagaacttcaaactgtgttgtcaagtagactgaattggggttgaatgctgttttttgataaaaatttgtatttaaaaaatcaaagatgtgcttttctgctggcattggagaaataataaaatcaaaggtgatgctgaatctcttcactcaattctaagctgtctacctgtagaattatatactctggattttccacaattgctaaaccacttcccagtggcaccagttgggtggtctctactttagacttcaaattaatttagaccaaacatccctaggaaggtagtatctgtagttttgtattatgcatgtccatgcatgtcacattcttttcctttattgtcagttgcagaaagtttgcctgtctcagttctgaaaattaagttgagggtcaggtatctgagtgacgggcagatttctttaacacatcagctgctttcttctctcaatagccaaagcccattccattggattttcacctatattgcagctttgatggcaccagaataaatctgtctgtcatgcagctttcttcattgctcagcttctagtattaagtaagaataaacttaaggaaactacagttaattgggcttgaagaatgtagcattcttttccatactctcgttgcatgccgatggaatgcatgtttcaactaaggcttaggagcttttatttttcaagtggtttgggaactgaagattaatgtccttattagttttaataaagcactaatggacatttaaatcttggctgttctccagggttttttttttgtgtgtgtctgtgtgtttgtgtgttttattttacaggctgatgtaatctctaaactcaacatgacagacaggtaaatccttcatactgtaacacccatgcgactgcttttcagacaggggaaatgtttctccacattgcttcctgggtgtggtactgttctattctctctctgtgtatttatttttggtaaggatttctgccatagaatcttactctgagttaatttgtatctctgaaatgaatcaaaagtatcctaaagacttttgaagatccctagtggggcattgctgattggaatgatttagtttaagcttgggagggagtaactctgctcagctaactgccctgcctgtgtgcacgcgtacactgtaccattgtcttcttatttacaagacttttcagtcgccgtaacaaaaagtcttcttgacagattagagatggagagggggagtgacggagaaactttcctctgggattcccacgaagcctgtggtgggggaagcagggccaagacctctattgtggttattgtagaaagcccctccatctgaagccactcccgtgagcacttcccatgagccccatccaggatttcccagaattgcatagtgagaagcaacctcactaggttgaggcagttgtctctcagaaggtaccagatctagtgctgaaaaagtgcccatgctgagcatagtctgggttcccccctctgagagcagacagccttgctcagtgtgtctgcatttggtcttgtgacatggctggggagctgggcagcagggtcacatgttcgtccccagatccttgccatggggccagtcagagctttcaggatttagcagcagtttagcaacttgggactagaatctgggaacccttttcatgggaactgtgtctctgataacaaatccaattctatttctacctccactcaccacccaccccagcccaggacaattttggagcttttgttgtaagacagttttgatacataaacaagtagtcctattccatgagagctggaaataaagcagaactgatgtcctgtgtttggtaggtattttgcaaataaaaagaaatgcccagtaaaggaaggtatcacagtattcaaaccttccacttgttttgggggcaactggttagagatacagacaatgctggataacttcctgtgaagttgaattgaatcagtggttgggatgttcaggtggaggacaggaaaggaattgccctgtagacacactgacttagagccgggtagtgttttcctctccgtgtgcagaagtttcctttgctgttagaaagtgacgatccctcagatggggactgctctggggtcgcaaacccacacagccgcagggcctggcagagcacttaacagagggaagctggccagctgtgagtctagacatggggcagcggccagtgggagaacacaccctgtatgaagggacagccacttctcagcgccaactcatgattaccatgtggaaatctgggcccagaattggtggctattttaaatacttttttttcaaaaagatgctgggtttctagatttttatagggaattttccagtttttcaatgttgacaacttgctcaatttttcacaaataccatgcagaccaaacatgagaggggaccacagactttttgcaacctctgcactgtagaaaacataaaaataacttcgttgcacacgttttgttttgttctagtgatatcttgttggagagagatttcactcttagagatcctgaattatttcgctgccttagttcatttctttttcattttgttaatgttgctatcttttggggctatgggataaagaaaatacatttttaagttgaacttctggcgtttaaaaggcgaggtcttaaagatgtgaagtggaacagctgacagccaggtgaaataaccgtctttccatacagacctctcaatgattcagcagtttgtatttcagacttctcatcttcactgtcagaaatactctgcctcaatttagattcccaagcaaactgtgtaacatgatttatacaaagcatttcccccagccttttgtttgttttgtttttttcagttaatttagaaagtttattttgccaaggttgagcatgcgcacccgtgacagcctcaggaggtcctgacgacatgtacccaagatgatcagagcacagtttggttttatacattttagggacacatgagacatcagtcaacttatgtaagatggacgttgccccaaccttttattatgaaaaattttaaacatacagaaaaggtgaagcattgtgaagtgaatacccataaacaaatttttaaaatataaaaggtgtatcctgcaggggtaggagaggcacaggacagggaacttgggagcctgtggtgggcctgcgcttcactgaggctggagtatagtggcatgatcacagctcgctgtagcctcaaactcctgagctcaagctgtcctcctgcctcagcctcctgagtagctcggactacaggtatgcggcaccacttccggctaatttttgtgtgtgtagagatagggttctctctatattgcccaggctggtcctgaactcctgagctcaagccatcctcccacctcagcctcctaaagtgttgggattacaggcgtgagccactgtgcccggcccaggatacactttttagacatcatcctccttccttcacggcctctggtgatggggctgtggttgatgagagtgaaaataaaagagcgaccagaagctctgtctgggttgtggtgcaagggcctggggaccagccaccaataaaataggatctcccagatgggcagttgtttagtggagttaccttccctttcttccttccctttcttcttcccacctgcctgcctgcttgccttctgcaagtgtctctgggccatgcccagtacagaccctgggaattcacccatgacgaaaattcagcatccactcccttggagctcacaggcctgtgatgacctctgtgaggacaggcgaagtctgggaactgaatcctcagcctgggatccggaggcactctgggttaatgcgcatgagtcacattcacaggcagctaccatggaaaccagaggccagatgattgacttctgaagagaactgtacctggcaaggcagccaggcatttcctcagtcagctctcctctccctgaccctgcagccaaaagatcacccattgaaggctgctcagccgagcatccttttccccctagacccaggcttggtgagggtgggaagctcagggcagtcgtctctggctgatgactgacacaggctggccattgggtctccatgttttggctggtgttgtggaagggggcagacccaccattctgctgccctggaaagaaagttgcaacaggcatggcacagaggcttgtgggaaaatcaccaaagggcagggagagtgaattgtccaggctcatgtggcacatgaggccccttgagggagctggtcctgcctccctcgccagcctcttatggctcctgccactcaccccacccccaccaccacatgcaccttccttctgttcctcaggcagcaggcttgctcccaccgcaggagtcgcttgctgtcacctcagcctgcagctcttggcctggccagctgcttcttaacatgtaggttcttgcttacatgtgtcatcccttcacagaggcctctccagaccgccccatctaagtggctcccacacccacacccccaccccaccttcccacgtcacctcaattgatttcctgggtcacatgtggtattgtctgaatttgccttcatctctgggtattgctgtatctactgttgggggtaggagtaccgactctgggcagatagcctggctctgctacttgttagctgagtgaccttggacaagttacttcatcatcccgttgtccctcggttttctcctctgtcattggggcagtagtagcagtctcatacagtcactgtctggattgttgagtcaccgtatgtgaagtgcttagaacagtgccggccatggtagcctccattcctgaaacatgttagacaatcagcacatatctgctgggggtgataagatcttcacggggactgtcagtgaggtcactggcccagttgggagatggcctcagtgtttctctcggctgtctacgccactcacccccaaagcacactggggttgctgctgctttttgacactttcttagatcttgcaaatctgagtgcaggctggggtcggtcacggacagcattccaaggggctggtggcgaggggcagagcagaggtcagatgcaggagctcatgggccatttggctctagctgctctgacccgtggaactgggcggtgtatgataaatatatctaagcaaaagtctcccttccatcattggtcaaagtcaagtctccgtgctgacactagaaaaccaggccattcctaacaactcagtttagagtgggcctttcatactccacccacaaaacagcagataagtggggaaaaaatacgctaccttctgtaattaattcagctctagcgtgtagtattgctttctgttaaatatggcctttgactttaatgctttaatatgtggaccaagtgacacacattacagaatctccccttccctctgtctcttacagttttgcgtttggctccctaatatctgctgtcgatccagtggccactattgccattttcaatgcacttcatgtggaccccgtgctcaacatgctggtctttggagaaagtattctcaacgatgcagtctccattgttctgaccaagtaagtacgggggcagagaacagacttttttcatgtgacagaactaaaggtccttgtaacaaaggggcagatatttccacacagcatgtgtacagttgcttgtcctctgggtgatcagttcacccactctctttctctgtatttctgtcctgacaagccttgatgtgctgcaagaatatggtcaggttccaggggtggttaaaagaggagagtccacctttttttttgagacagggtctcgctctgtcacccaagctggagtgcagtggctccatcacagctcactgcagcttcaacctcctgggttcaactgatctcccacctcagcctcccgagtagctgggacttacaggcacgtgccatcacgcccagctaattttttaagaagtttttgtagagatggggttcgccatgttgcccaggcttgtcttgaacccctgggctcaagcagtttgcccacctcagcctcccaaagtgctgggattacaggtgtaagccattgctcctggctttgcccacctttttcgacctgccttttagtagtggtttctgagcccagcttgtcaacatcactgagggtgcttattaagtgtgacattcctaggccccaccctcagagcttctgattcatttggtctggggtgagtcccaagaccatgggtttttaataagttccccagatatgatgaagcggcctgttcaggggtcagtgtttgggcaatattattggcaacaaaagcaatagacagaggccccactagctgatgcatgtcaccttccttttcacagctttaaaataaggtaggaatgctgataggtgccctgccttaagatgctattgtgtaaactctactttggacactacaatttgttttcaaatatttgttggtattactaccctaattgatgggatctgagaagttaaagatgaataataaaatgtcaagaagtcattgggggccaggcgcagtggctcagtcctgtaatcccagcactttggaaggccaaggcgggtggatcacctgaggtcaggagttcaagaccagcctggccaacatggtgaaaccctgtctctactgaaaatacaaaaattagctgggcttggtggcgggtgcctgtaatcccagctactccggaggctgaggcaggagaatcacttgaacctgggaggcggaggttgcagtgagccgagatcacaccactggattccagcctggtgacagagcgagactccgtctcaaaaaaaaaaaaaaaaaattttagctgggtgtcatatcacgtgcctgtattcctagctactagggatgcagtgagctgtgatggagccattgcactccaacctgggcaacagagcaagaccctgtctcaaaaacaaaacaaaacaaaatcactgggaaaagtaaatgcatttcagataatctcaaatatatttttctgatgcagggatatttccttgaactctgcattttatggtggtcattaacaggcaggcaacaaacccaaagatttttgccaaaacacagatgtttgagaccagtctggacaacatagcaagaccccattctcccaccttcccgcaaaaaactccaaagcacgtggagaaaagagccccggataatgtatcaaaaatgagctaagagaatcttagaggccagtgtgtgttctgttagataatagaatttccatttacctgaatactgacttactgcctttgctaaagcataaccactctgtggtagctggcattttcttagaagtttttttatagactatattcagaattcttatgttggaataaaatgcctcagcctaggactagatttgaggactgaatagttaaataaggtactacagggctgggcgcggtggctcacgcctgtaatcccatcactttgggaggctgaggcggatggatcacttgaggccaggagttcaagaccagcctggccaacatggtgaaaccccatatctactaaaaatacaaagattagccaggtgtggtggcgcacgcctgtaatcccagctactcgagaggctgaggcaggagaatcgcttgaacctgggagacagaggttgaagtgagccaaactcacatcactgcattccagcccgggcgtcagagtgagactctgttttaaaaaaaacaaacaaacaaaagggtactatgagaaaagcatccagcattgggtaatgtgacatcctttccttttctttccctgcccctagttgttgttttcaccacatttgcccagtttttgccctgtttttgcccttcctttgcaggaggagcttaccaaatactgcctgatggcaagaggtgctcaacaggccttaaaaaacaaccaaacttataagtatttttgttattctaaatgtagtacatatattcttaccaaatttaggaaatacacaagcaaaaaagagagaagtatcacacacattgctactacctagagataattatggttgataatttggtgtaaatatatatacattttatttcaataggcttataccccaaatattgtactctattttccattgaacacaattgataaaacagtcttctggaaaataattttactggttacggtgtattcctttttctgggtttactatgatctacttaaccagtttcctactattggctttttcatgtttctcttggcagaaatttctatagctttattaggatattatccaacatcatgccacaagacctttaaaaaatccaatggcagtattttttcttatttaagatctactctgaaagctgcctagcattctggtttttacttttatctcgtatcctggctacacatattgaacatttgtgacaaggaattttgcctaacttggaggtgacatcatgagttatttttatgcattgggagctaaactcaattgctttgtctcttgatttttttaaagaaaaataatttttcagaggtaggatcttttctgagcttttccagttgtctctattataaaagccaaagataggagactttttctatttaagatgggaaatgatggagtcatcgttggtagccagaggttcttactggaaaagtgctttggaaacccaagatggggccaggcatggtggctcatgcctgtaatcccagcactttggaaggccaaggcaggtggatcacctgaggtcaggagtttgagaccagccttgccaacgtggtgaaaccctgtatctactaaaaatacaaaaattagcccggcatggtggtaggtccctgtaatcccatctacttgggaggctgaggcaggaggattgcttgaacctgggaggcggaggttgtagtgagccgagatcgcaccactgcactccagccagagcgacagagcaagactgtctcaaaaaaaaaaaaaagaaagaaaagaaaccaagatcgtctgtggtaacagttcccacagttggatctgtggagcatgcatgtatagtttccagtctcctcgtccaccagcagcagtgctactgctgaggccacggttggatctgtggagcatgcatatatagtttccagcctcttcctctaccagcagcactgccactgctgagacccaagctggcttgagaatcagcctcacaaactctccagccacggctggtcatctgccatcagcatttggtgagggacctctgtgtgccagacactgctgagagccaggtggatttgacagtcggtccatgatgggcaaaagatgcccgtagagaagtgaacatggtgccttaagcatgagggggctcaatgaccagaccatgaaggatatgaggaaggcttctcagaaggaacgtcttgtgagccaggcctgggaggcttattttcagacagaagatacagaaaaggggcatgtcagacttacccccgcctccccctccacctttttttttttttttagtacagaagaaaaatatgctcctgggagctgttgtcacctttccttggttatcagaatcatacctggttttgaagaggtatacttcataaacgatcatctccaaagtgagctgacacatttatctttgcaactgaatatgtaaatgagttaccccctttttgatgttgttaccttcatgaatgccagaaagcaaatgtcttctgtttcttcggtaacttgaattcattttcagctttgatttgttgctatgatagtgtgttcttaaagtcactgctgtagaggaaaccttttgttttctccagctacagcttaagctcatgaaatggaccctgaagcaatactcccttttattctttaaggtatgagaaacatgaccttaagaaacaaaatgtagaaaattaccaggccagaaagagtccaaattctactttcattacctggagttcagaaaccattgccccagccctggatctgctgttaaccctttgtgtgaccttacccagtgactcactctctttgggcctcaggctactctgtataaaaagcagtgaaaccagcctgggtacctgctgtggtagtgatgtgggctgaggctgggcactgtatgtgtgtgacctgcagatccatttttgggaactatgggtgatcatggccttcaaaagcacttttccaatatgagcccttgttggctgccacattcctcaaggtgggatgttaacctgtgatctgctagaaagaagggggattggggagattgtttgttcagatgagtctgcaaagctttcacgtgaagaaagttagatttcttttttgcaagacttctcagacctttattatgttattttgggctgtgaatttcctcgaaaggctttctgagtttatttgaccaagctaccttttcatcttattctgctttaaaatgataccaatcctggggcctggcatggtggttcatgtctgtaatcccagcactttgggaggccaaggcaggtggatcacttgagggtaagagttccataccagcctggctaacatggtgaaaccccgtctctactaaaaatacaaaaaaaaattagctgggcacggtggtgcgcatctgtagtcccagctacttgggaggctgacgcaggagaattgcttgaaccctggagacagaggttgcagtgagctgagatcgcaccactgcactccagcctgagcaacagagcgagactccatctcaaaaataataataataataaaatgatatcgattcatgacatggtgattgatgaagctgaatattactgttgactattctttgtttcatttactgagtcaacaaaaaggtattgactgtcttttgtgtgggaggctctgctttaagccccggacataaggcagcgaacaagatggacacaggcttcatcctcatggaatgaggcacgacagtttcccatgctgtgaaggagaagtcaagcaccatgacaacctttaaatgggcaggcctgcgtgaagggatcagggcaggtgtgcctgagggagtggcactgaccctgggttctgagggatgaataagggagttagctggggcaaggaaaagtgaatggtgaccacctgggaggtgccagtgacagtgtggcccagatgtttagatttggggagaggaggtaaggtcagagaggtatggcaggcaggagccaagtcaaactaagactgggcttcctgataacgtcgggaaactgtgagttctgaacaggctggtaacctgatcaggtgtgcctttgaaaaggatcagttagggcctgtatttctagcactttgggatgttgaggcaggcgaatcacttgagcccaggagttcgagaccagcctgggcaatatggtgaaatcccatctctacagaaaatacaaaaactaactgggtgtggtgatgtatgcttgtggtctcagctactctggggctgaggtgggaggatcacatgagcctgggaagcagaggttgcagtgagctgagatcatgccactgcacttctgcctgggtgacagagtgagaccctgtctcaaaaacaaaaagagggggatcatctaggccactgagtggacaacggggttggtctgtaggaaggcaaggatgtctagaaggagatcagtgagacttatccctgggagtaaagggcagtaggggagggaagaagggaatggatttgagagacacgaggaggatatttaatgagaataactcgatgttcatggtgtaatggttttatctttaaggacaaaaccaacaattgaatttaataacatctgacattttactttgttctgttacagtaaaaggaaagttctttctttcatttcttcctccttaatgtctcctaaatcctccctctcagcctgaaacctcggacatttcttctttgggtagctccattctaatctgacttgccatagcctcaatttcaggttttatcacaggatttctgtactgaaatccttcctatcgactccccaggccttcaagctgaaataccagcacctttcctgggctctttcctgtccctctgccactcttctcaccttgcctcctgccactgtcccacccccaccccaccgctgcgttttagctgcactaatcttggtacttgaaagttcctacaatgggttgcatatgcatgggctctcttcctttgcacatgctgttccctcactgggtgccttcccccatttcttcacctgggcaagtcgtctttatcccaaatctaaacccagcccccggccttttttattttttatttttttgagacagagtcttgctctgttgcccaggctggagtgtagttgtgcgatcttggcccactgcaacctctgcctcctgggttcaagcgattctcctgcctcagcctcccgagtagctgggattacaggcgtgcaccaccacacccagatagttttcgtatttttagtagagacggggtttcaccatgttggccaggctggtctgaactcctgccctcaagtgatctgctcacctcggcctcccaaagtgctgggattacaggtgtgagccaccacgcccggcatcagcccacattttctcaagcaccttccttgagcccggccagtctgagttagttacctacccaccctgcttttctacagccctctacccctcccgcggattgtcattagtgttcatcttgtttttctccctcattagcctgaggggaggagctccttaagggcagcagctttgctctcatctctgaaccccagaaaataacagtacctgggacaaagtaggtgaacaataaacgtttggctgactgaatgaatgatggtatgaatgaatgaatgaatgagcgaataagcaagaaatgttttaagttaatttctaagaactttgtgtatataacattttaatttatttctgttttctttcatttcctagcacagctgaaggtttaacaagaaaaaatatgtcagatgtcagtgggtggcaaacatttttacaagcccttgactacttcctcaaaatgttctttggctctgcagcgctcggcactctcactggcttaatttctgcattaatatccttttaatgtgatgaacatgcagggttaaaattattcctgataacttctgtctctagccagtttctcctgttttttaagggggccaattttagatgaagattttgcttaaaggaggatttttttgcttagtttttgtttgagaaacactctaactcaaggattttttaatctaacgtgaaatttaggatgtcacttttcaaagtttaaaaaacatgtacactgttggatatcagatgtgattttggggacctctcagttcccagagtatgataaccacactccgatgattttcgttttctgccatcttacttttcacatttggaaaactggaaattaattttctttgaaaatgtcaaatagaccaggtgcagtggctcatgcctgtaatcccagcactttgagaggctaaggccagaggattgctttcgcccaggagttcaagaccagccttagcaatggaatatagtgagacctcatctctaaaaaatacataaataaaaataaaatgccaaatagagaaaatttttatcccactgaaagtgtttatccagaaggattgcaaaaggggctttcaaagtgtgttccattgagttatttgcactgattttgttgtttgacaaccaataagcttttccagctggagatggaaagaggcttgttaaggccaatgtcacctttattgctgtagaaatttcattatgtttaaaatagtaacaggcagtagaccacttcggtgcgcacctaagcctacgtctcagggagatggccacctggcccgcctccacgagcagtttgtgtcacagatggccggaagagactcttttgcctggttacaggcatgtttttctgccatcctgttgaattttcccatcaactcctttgtccagaagtctaagggctctattgagttggctgacagcttctcatattgtaccaataaacagaatggaaaagaaaattttttccagttcagtattttcctctatatttatctttttctttaaaaaaaaaaagtatctatcaaaatgaagtggagcaaatgggtactgtgagctccagtataggcattgtgaatgatgtttcaatatatagaaggctctctcctttcacaggggcatgagtttggaaatctccaggaataggaaatactgtgcttcaacagggcctcgaacctcagtttgaacagcgattctcactagttgtctttgactcaaaactgatggggaaagcaagatgggtagcattagtgatctcatccgatgttgttggaggagtgggggtgatgccggccctgggaggaacctggccaagtgagctgtccttggtgtgtctgcagccccagctttgcgccatggcccggcacatccccagccctctaagtcagcgtttttaaatgagttgacttaggttgattttcatcttccaccaccatttatctccggaatttacatttcttagtgttttgtcagattccctttcttatagcaacagtctccctacaaaggaaaaaatccataatgacaaatttccatttgtaaccttgggacattctaaaatctatatctgttgtttacttcatatatttggaaagcagcagttttgtgacttctccacatctcccatcaactctccctcgattctccttccttgacagttgtcatttacgtgctgaagcatattgacttgaggaaaacgccttccttggagtttggcatgatgatcatttttgcttatctgccttatgggcttgcagaaggaatctcactctcaggtaagtgacagagagcctgaaagtgctgtggtgatggcatcttgtcctgcctggggaaagaggctttgtcagttgggtcacttttagtcacaagagacagtcacaactcagaagagcttaagtaataaaggaaatctattggttccctagaaacacatctggatttaggcctgcctggatccaggggctcaaacagtcacattggtgtcacggtcacattttctcttaacccgccttctctcatttagcccatcagtcctgtgaggctccctcagaggagggtagccttgtaggagggaggtactgtgaaggtccctgttttactgatgagaaaactgaggttgagtgagattaagtaaattactcaaggtcacagctgggattggtggaacaacgattcaaactagttgtcttggagtcaagaactagtgcttagaaccctctaatacaactccctccaaaacagatcatcatgaaaccatgtactcagtgctacatagagggacaagcaaagtgtggtggtggcgtaatgttgggcgtttattggacacactttaccagtattcagtttttttatgctgataccagccctgtgaagtaggtactaagaggttgtcattagcccaaagctgcactgcacaagcagtggtggtagtgagattgacagtggaggcccagagccttttccctgcaccccattggaggagggcacacagctctcagcagcagagacgactctgatgcggccctagaagatgatgctcaccagctggaggaggggtggccagtcacagcgtaatgatcttggagccgtcacctggtaatcactcagcagcccaatcaggcttggcttagttgggctttctgcctacaagtggcagtcaagcttgcgtccacagcttgttacgttgtaaggatgttgacctgaaaatggagcgtgactcacccctgttcctgtgtgagggggcagccagttgggaagggctctgccctggaagtctgatcccatcctttgagtgaaggcccttcagaggccttgttctggaaaggaggcactattgcagggatgttttgatctgtgccacaagatggcagagattttcttttttattaacttcgttgaggtataatttacacacaatacatggacccgttctaagtatatagttccatgaatttttgcaaatgtggacagtcataactacccccacagtcgaggtgtggcatattcttatcgcccagtgtggctcccctgtgcccttctgcagtcagtccacctgcctgtcctgagccctggcacccactgatcctgcactgtcattgtagtttaaatgaaatcatgtggtacgtagtcttttgtgtctcctctctttcagttacgtttttgagagacatccgtgtttttgcgtgtggcagtagtttatcgttcttattgcaccacagtttgtctgttcatcatttgaagggcatttggggttttccagatttgggctaagaacagtgtgcatgtgttttcatttatcttgggtaaatacctaggattaaggctgctaggtcatatggtaagtacatttttacttttttagaaactgcctagtgtttttcgaagtgactgtatcattttacattcctcagaatgtatgagagagtgccagttgcttcatattgccaccacacttattttaatttaaaaaagtttagctgtcctgataggtgtgtagcaactgcatttagatgtgctttggtgtggttatttttatattcgccttgggttcattgagttttttgggtttatagtttatatgagtttatagctttcatcaaatttggtaagcttttgcccatttctttatcaatatttttttgttccgccttcctcttccccttgagacttcagtttactccagttatgagaggtagcatgctattggcccacaatatgctttgcctttttttctttttttccctatgtgcttaattttggttatttcctgttgccgtatcttcaaagtcactgatcttctgccatgtggaatctcctgctaatcctacccagcgtatttctcatttacatattttataattcatctacagcagatccctttaggttattttcatttcttccatttctctcttcatcatgttcatgttttcttctatattctggagcatatgaaacatagaaatttctgatagctgttttaatgtccttgtttgctaattccgtcatctctgtcaactgtaggtctgttttgttgttgatttttcttgtgcttataggtcacattttcttgctctttgcttgttattaagttttgattggatgtcagtcattgtgaagttttatgttgttgagcacaagattttattgtattcctttacggagttctggacttttcttttaaaaacaattttttttgtgtgtgtgtgttatttctggacttttcttctggcacgtatctaagtctcttgacatcagtttaatccttcttgaggcttacatttaaacttttttagggctggtgcagagtagcagggccctaactaaggtgtctcaggtaccgtgagctcactccactctggctggtgggaacgcaaactattcccacccatgtcagcttctggaattgttcagcctacttctttttaatggttctttccccagcttcttgtttcatccgacatatttactgatcagtatcagtcaaagactcaaggggactttacagtagatgtccaagagctctctttctgtgcagcttccccgactcaacaggacagccctcttaaagcctcagcctcaggcagtcagctcagcagggggcctagggaaagagtggccacctttgtctcccttccggcaggaatcacagtcctaccctatcttttgtcccatgtcagaaaatagttttgtttcatatcttgtatcaggttttctagttatgtagagcaggacagtgttctgtgtagcagtaatttcttcagacgcaaagctgaaggcccagtggtctctagtgactcagttgacagaacttttctacccagtcgctatccggagtcacacttgggtgctgcatgagcagcacaaggaggaagcagagtggactcaccattttcagggttttgtttttcatcgcagaccagttcaccagggtaattccatcctggtgtctgccatgaggttccctttctttactgaatgttggcacttacaaaaacgttacctgtgagtcattcggctctagcctagctatttttacatctgtttttctaaattgttcctctacccccttgagaagatcattgagtacctgttggcaaagatgtgtttcatgcatctgtttggaatctgtgattaaaataagggagtgtttttcttaccttcttttcagactggcagtgtttcctgttgagaggggtttcatttccttagggaccttgctccacacacagcagtgcaagccaggaacaccagatctgcctctgggtgagggaacctgctctgtccgcactttgccttttgggtatttgtcacgcagggttttcagagaggggcaggatggccctgtgtggtgtgtggacgccccacattgcactgtgaaagcacagatggaaagggtggtttctgctgtcttcaccttcctttgtgtgctccccttttcctgactatcacaaaggactgatctcaagtggttcccaagaccatggagcaggacattctcttcctaggaagtgggaattatttacctaaatccacatgtagggaacacagttgctaaggactggggctggataacagacagacttggatttgaatcccagctccacctcttattggctgtgtaacctcagattacagacttaaccaccccatgctctacttcctcattataaaatagacaaaagggccagcctgacgcctttgctgaggagtggggagcgatgcaagtgagagtcctgatggggcatctgtgccactgctggggtggccagaagtcctggtttgccctctgtctcaatatgatgaattaataatatccccgtttattctaaaaaatgtcctggtatccacagcaaatcaaacagtctccctaattataactcagcaagcgttagctattctcagaatatttgttctgactgtatccatgttaactatttttattgttcagtcaagccagttttgagggccactttggcctctgacactaaagattcaaagatgaatagaccccacttaggcagagcagttagcgaacactgggcttgcaggggatgggagagagtgacactctgtcaaggtgagtcacagaggaggggactttgggcttgaaggatgagtttgcaagattaatcatgagataacactttctttctttctttctttctttttgaggcagagtttcgctctgtagcccagtctggagtgcagtggtgccatctcggctcactgcgacctctgcctcccaggttcaagcaattctctgcctcagccttccgagtagctgggattacaggtgcccaccaccacgcccgactaattttttttttgtatttttagtagagacagggtttcaccatcttggccaggctgatcttgaactcctgacctcgtgatctgtccgcctcggcctcccaaagtgctgggattacaggcgtgagccaccgcgcccggccaacataacactttcttaagatgttggcatgggccaggcgcagtggctcacacctataatcccagcactttgggaggccaaggcaggtggatcacgaggtcaagagatcaaaaccattctggctaatatggtgaaaccccatctctactaaaaatacaaaatattatctgggcatggtggcacgtgctggtagtcccagctactcggcaggctgaggcaggagaattgcttgaaccagggaagcagaggttgcagtgagccgagatcctgccactgcactctagcctggcgacagagcaagactccatctcaaaaaaaaaaataaaataaaaataaaaagatactggcatgaagttggccaaagatagaatgtatggtgcagtgctcttctgcacagatatctaaggaattccattgcagcactgcttgggagagaaaaactggaaggaactatatgttcatcagtaatggaaaagatcaaattccagtccatttgcactatggaatcctgtgcagctacttaaaaaatgaacttgacctgtctgtactgccatggaaagaatttgacatattgttaaattttttaaaagtaagttgaaaaatcaaactctcgcccattcaagaaatacttattaaatgtccaccctatgctgagaactatccttgctgttggggctacatttataaacaacacaagatcagtttccttttcttgcagaagaaagccagaatttaagcaaacccatacaacaattccaggtggcaagaaatgacaagaagagaaattaaagccatgtgacagagagtggcatgtggtagagaatggatgggatctcaggcagtcagggaggtctcccctggaggtggcactggagcccagacctgtgtggcgagaggagccagcccagggacgctctagggaaggagggttttggcagcaggaactgcaggagccaggggtctgaagatagatgtgcgggagtgtggcatgctccaggaagagaaggaagaccagtgtggccaggacgctgcctcacaggttctgcaggcctgagaaggagctgggtttctagtatatgcaccacgacaagagagttggaagcccttgaaaaaaaatcactctgctggtaataggcaccatatatgtgataggatcctgtttattactttagttttattttattttaattttattttttgagacaggatcatgctctgttacccaggctggagtgcagtggcacaatcacgtctcactgcagccttgacctccccaggtttaggtgatccttccacctcagcctcctgagtagctgggactataggcacgtgctaccacacccaactagttttgtattttttgtagagccagtctcactctgttgttcaggctggtctcaaactcctgggctcaagcaatccacccactttggcctcccaaagtcctgggattacaagtgtgagccaccatgccaagcctattactttaaagataaactttataatcacatggtaaaagaactggcagtctgcatattgaagtgttaatagtagttaagagtagttacgtctgagcgggcagtatgaatagattgtcttttactctgtacctcagtgagtctgaatgttttatggcaaaatatgtttattattgagtaattaacacagcgtactcattacggtttcactcagccctcaagaagtatgttatattttacatacagtaaggcacggtacagtgtaaattgtaccatgataccttttcactgccttttggacttgaatcccatactgtcttcctttattacatctagaacagtggatgtaaccataaacagaagtggatttcctctctccctttcttttctgccattcttccttcaggaggctgaacgcttttgctgcatttgctttcttaaacgattttgcctaattcttaaaggaaattcttccttaagcgtattttttcaaataccatgccttttacctcacttaaaaaagttatcctggtttgcaccaacccccgcttttgtgtttctgtagcctgctccactggccgcagatgagggtgatgtgggtggtggagagtcccctttgcttctggagggcatatgaggcagatacttgagccatccctctggcttttgtgcctgctgctgaccctctttcctttcgcctagaactcaaggtgccctgaccccacactagcccagggtaaagccctctgggattgtccagatggcccagtgccaacagtgggtcaggtgcacaggtggcagctgtggtccagtctcagcccccagacagggcttacttatccatatagaaaaatccaaaatgtttgaatttgttgccatccttaaagatggagatttcctgtaaggaaaaccagaaggaagactggtccatgttagatcctcagtcccacagggctactgtcagcctttgtagacaggctgagccgagactgcgcctctaatcccagctgcttgggaggttgagacaggagaatcgcttgaacctgggaggcggaggttgcattgagctgagatggcaccattgcactccagcctgggtgacaagagtgaaactccatctcaaaggaaaacaacaacaaaaacactcttgagcttcaaagagccctaaaggagcaggtaaagaagtctcctaccctctcattttccttcgcccaccatgtcaggtgtgtcttacaggaagcatggctggaatctccctgtaggggaaactgaagagcaaaggcatttgctgtttcctaagagggttaggagatcaaatgtccagctcctgctgtcactcagccagcccatacctgctggggcaatacaaaaaagtaggtttcctatattttgtagggtattgtgttacagtaagcttagcagttgacaagtctgtaatacagtgctgtgattttcacccttttttttttttttacagttttttgtttgtttgtttgtttgtttttgagacagagtcttgctctgtcacccaggctggagtgcagtgccgcaatctcggctcactgcatcctccacccctccaggtttaagcagttctctgcctcagcctccagagtagctgggattacaggcgtgtgccaccatgcccagctaattttttgtatttttagtagagacggggtttcaccatcttgaccaggctggtcttgaattcctgacctcgtgattcacccgcctcggcctcccaaagtgctgggattacaggcatgagccaccgcgcccggccgattttcacccttttatacgtggaaagtttgccagatagtcactgtttccacaaaatggcagaagtgaattaaaactttgcttttaaagtttgacttggaattagtatatcttggcagcttatttgatgattttttaagacaatctcagcttccttacatgaaatagagacccctttcctgctccctatgcagggagatgctgagaagagacctgtgagttcctcaggagtgactgagggcagcggacgaatgtcgaggctcaaatcctgtgtaagcacagaaggttgtacacaccctcgtgcagggctctgaagaaaagatgcattacctttttaaataacagtagttcatgattatgggaaaattcaaagttaaggaaaagtattttaaaagtccatcaaaatccacacatttagctgggtgcagtggctcacacttataatcccagcactttgggaggccgaggcaggttggattgcttgagctcaggggtttgagaccagcctgggcaacatagtgaaaccccatctctacaaaaatacaaaaattagctgggcgtggtggtatgtgcctgtggtcccagctacttgggaggctgaggtgggaggattgcttgagcccaggagatggaggttgcagtgagctgataccacgccattgcactccagcctgggcgacaacgcgaaaccctgtctccaaaaaaaaaaaaaaaaaaagaggccgggcatgttggcttacgcctgtaatcccagcacattggcacaatcctgaagtcaggagttcgagaccagcctgactaacatggagaaacctcgtctctaccaaaaatacaaaaatgagctgggcatggtggtgaacacttgtaatcccagctacttgggaggccgaagcaggagaattgcttgaacccaggagggggaggttgcagtgagtcgatttcacgctattgcactccagcctgggcaaaaagactgaaactccgtctcaaaaaaaaaaaaaaaaaaaaaaaagaatccacacattctccatacacagattcttaggctcctttctgccccccagagtggtttgcttgccacccttatatagtcatccctcagcatctgtggaggatcagctgtaggactccccacgtatagaaaattcataggtgctcaagttccttatacaaacggtgcagttggccaggtgcagtggctcacacctgtaatcccagcactttgggaggccgaggtgggcagatcacccgaggtcaggagtttgagaccagcctggccaacatggtgaaacctcttctctactaaaaatacaaaaaattagccaggcatggtgatgcgtgcctgtagtagtcccagctactcaggaggccgaggcaggaggatcacataaacctgggaggcagaggttgcagtgagccaagatcgcacgcactattgcactccagcctgggtgacaagagcaaaactctgtcccccccccaaaaaaaagggtgggggggtagtgcagtgggccctcaatagccacaggttccacatctgccaaccctatccctggatgtcagtgatggtccacacctttttatctttggtgctgtgaaggggactttacatggcttattttcactcaccctcctaacagttctgtgagtggctactattagtcccactgtacagaagcggaaactgaggctctgatgggggatgtaatgtggctcaaggtcacccagctagtaatgaggctgccagagcgaagggacccatagtattttttctgaagcctctgggaggcttcaggaattcatttattttcctttttcttaaaccctctaatgctctaggccccagggccttgcaggcattgtgagatctgagttggggatcacacggcagtgctttctgttctgttctctccctctctaggcatcatggccatccttttctcaggcatcgtgatgtcccactacacgcaccataacctctccccagtcacccagatcctcatgcagcagaccctccgcaccgtggccttcttatgtggtgagttctgcttctgtgtggccgtgagcaggcccacccagagctgatcttgcttccttatcctgtttgagaagtcagttgagactttccctggcagcagggcagcagctcctcagagccagatccctcactcccttatcttttgtttgttcctctggctttgaaatttcataaagtaaaccaaacacctaataaatgaacatctggcgcctacaatttaaagaccaaaaatagtgagaaccaattatgaacatttgatacatgcatttttaatgtattaatgtgacatttccaaaaatgtattccttggaaataaaatattaatgatggtttggtgaaaatggctccatagtcaagcaaggcatggggctcacacctgtaatcccagctgcttgggagactgagaggatcacttgagcccaggagttcaaggctgcagtgggctatgatcttaaaaaaaaaaaaaaaaagaaagaaagaaaaacaaagcttttgtagtcaaacaagagtttaggaaatcctggttaaataaagtttaacatttatgaattgccagacttttcagcaaataatggattgtcaaatccttaacgggggatatagttatagaattttccaaacttgtccacagaatcctttattcacaagagcagcctgagggacatcactcggggacagttcgcagtagaggtgtcatttgttgggctgggataaaccacgatggctttgtctttaagcagtttgttcaagttcttgttcccccacgctccgacatacccatgtatctccccaccaactttatacttggaagtggttggagtcggggaacagctctcaccatgtccctttaagctggcccccaagtgactttgccctagctgtcatcaaaatcacccctggcattttgagggacttgtctctttttttttttgagatggagtcttgctgtgtcgcccaggctggggtgcagtggcgtgatctcagctcactgcaagctccgcctcccgggttcatgccattctcctacctcagcctccggagtagctgggactataggtgcccgccaccatgcctgactaattttgttttttgtatttttagtagagacagggtttcaccgtgttagccaggatggtctcgatctcctgaccttgtgatccacctgcctcggcctcccaaagtgctgggattacaggcatgagccaccgcacccggccacttgtctcatttttaattgctacttccacactgttagcgtgctaggaggcaaaggcaacccaggcagaaacttcagcagataaggaggctcaggtgaggagtagtcacatgacttgcccatggtctcatggccaagaagtgggtatgcaggccaggtctctttattcctgggccagagggtattatttgtacagcacctctctcagaaagccaggctacagattctgaccctgagcctcccagttaaagacacataaagcaaatcgtccatccaaaaagattctattttgtacccagcagtttggcaaatgttaagtttgataatacccacttctggccttggcgtgtggaaaacaggcctactggaatcttttctggagagtcatttgccacgtctgtctgaatttaaaaggcacgtgctctttggcccaacagtccaaccctgtggaatttagcccatactggggtgtttgttgaacctctcagaaataaaaacagtctaaatatccatccatagaggattgggcattagaaaaattgtcgaattttgacaatttgtcaaatgtgacagaaaaactgtcaaatttctctgcaaataaacattatcccgccaagggaagatgataaacacaattctgcctgtttactgaacaccttcattagcaagggtcccaactgtggcaaagtggcagaaattcagagcaaatggataccgtgatgtatccagatcctggagttgatgctgccagggaaaagcatccactagatctgaatgtcttctaaatgtgctcatttggaaagatcacacaaatattagataagaaaaaaatttcagagagagaagggggggtaaattctccagcttgtggacttgttttaaacttgggtaccattcaaaggaaaaacattgttagaatgtaaaacagccttgctgtttgtgatcaactattttaaaatacagttttaggccaggcgcggtggcttatgcttgtaatcccagcactttgaggggggccaaggtgtgcggatcacaaggtcaggagtttgagaccagcctggccaacacagtgaaaccctgtctctactgaaaaaaaaaaaaaaaaaaatagctgggcgtggtggcgagcgcctgtaatcccagctgcttgggaggctgaggcaggagaattgcttgaacccaggaggcggaggttgcagtgagccgagatcgtgccactacattccagcttgggagacagagtgagactctgtctctaaaaaaatatatatacagttttaatctctttagtcattatgctgttctgagggccatcacagtttaagcagagagcctagtgttagaaatttataaggtgctttttcttaatatatacaagtttgtgtgacagagagtaaatattgggctctttttggctcgcagagtggagccaggagttagcaatgagtctcactctgcaaatcctgctgggtgtgagctgtgttctaaaccttgtggcagtgttaaatatattaagctaatcatgtggaagttaaccagaggccccttcacatttgtcatgtggcgtctgcagtcatttgctctgaatttttgccactttgccgcagttggggcccttgctaatgacagtgttcagcagattgacagattcttgtgtttatcatcttccctgggtgggatcgtgtttatttgcagaagtatttgacagttgactcattacattaagagatttctgaataccagggacatgtagcttatgtaatagaaaagaatgagagaatttaagcacaagtttgaccaagatattggctgcaggattttcaagaaaataaggaaagtgttgtattggattctgactgtgaatgtttgcttgcttaatagtttagtaccatattggaatgaaatcattggggttgaataatccattctttggtttgtttcagaaacatgtgtgtttgcatttcttggcctgtccatttttagttttcctcacaagtttgaaatttcctttgtcatctggtgcatagtaagtattttcctttttttttttaaatttaattacttatttgtagatcaataaacacatgttccggattcatttatgtaactgttaactgttcaaagtcaacagctacatagacactcttttgtttaaagtttcttttgttaaaaaaaaaaaatcacaaacatacagtaagggggcaggggtagaattaagtgaataaatatccccagaaaggacttttgcttgttttttaagatttttaatggccttgaatattatggtctttaaataaaagtacaggtttgtaagtttttgtgtgaggaggtaaaagcagatttcaaaattgaatatgtaattgatcataaccatgtaaaaatattatgcacagaaaaaagaaaatatgtaaagaaaatatagccacatgttcacagtggtcatagagttgggatttctttctcttttctgctttttctggataatttattatgtacttcttactgcagttttcttcaaatttgtctatttatatttgtctatttgtctgtttataagatattgttcctgcaacctgggtacttccatctctcagtcagcaagagctcattgctcttggtcactgttatttgtcctccaaactcaggtttcagggcaagagagaagcagcaaaagtcctttacagaaagtataatagcctaggctgggcgcggtggctcacacctgtaatctcagcactttgggaggccgaggctggcggatcatgaggtcaggagtttgagaccagcctggcaaacatggtgaaaccccatctctactaaaaatacaaaattagccgggcgtggtgatatgcgcctgtaattccagctactcaggaggctgaggcaggagaatcgcttgaacccgggaggcggaggttgcagtgcagtgagctgagatcatgccatttgcaccccagcctgggcaaaaagagcgaaagtccatctcaaaaaaaaaaagtataatagcctttagtgtggccactggggaaaagggacacatttgatcaaacctgaaacaagtgtaggcatggaagattggatttcagtgggtgaaacagggaggtgactatttcagccacaggttgggaggaaaatgaaaggatgccctggggtgacaactcagttttctctaagcagttaggcccaggctggccctgcagctagtggagatggcctattcaggtgggttacagttcctgccctgtaaactcaatttagtggtcaagagcatgggctttggggtctgaaccagatttgagacttggatccattacttcctgccttgtcaacttggaccaattacttcatctctctatacctcagtttccttgtctataaactggagacaacaatacctactttgtaagacctttgcaaggatttaaatttagcaggataatgcatgtaaaatgattagcatgttgtctggcatagaaatgtttgatgattggaaacatttactcttggccaggcatggtggctcacgcctataatcccagcactttgggaggctgaggcgggtggatcacttgaggtcagcagtttgagaccagcctggccaacttggcgaaaccccgtctctactaaaaatacaaaaattagccgggcatggtagcacacgcctgtaatcccagctactagggaggctgaggcaggacaattgcttgaacccgggaggcagaggttgcagtgagccaagatcacgccacagcactccatctcaaaaaaaaaaaaaactctcaaattcatgcttgttaaaggaataaacttaaagcctaaagaatgtactgtacatgtctatatcatccttttcaagtagttatggtgagaaccaagatgaagaaaatgaaagtaaagtaataaatgtcctaagaatccacttagataagatttaaactttaggctgggtgcagtggctcacacctgtaatcctagcactttgggaggcaaaggcaggaggattgcttgagaccaggagtttgagaccagcctgggcaacatagcaagacctcatctttaactaaaaaattttaaaaagtagccaggcatggtggtgcatacctgtagttctagctacttgggaggttaaggtgggaggatcactggagcccaggaggttgaggttgcattgagccacaatcacaccactgcactccagcatgcgagacagagtgagactttgtctcaaaaaaaaaaaaaaaagatgtaaactttacataaagctgtactttgccaagactaacatgcctttggagatggagaggaaccaaaagccacagcaagcagctggcaggctaagccggggcatgtggcctcctgatagtccctacctctgcgttcctcttgctcagagagcagtgtttccatgcatgggaggtccttcatagctgccctcctttccctgagggagaggcagaaacaccttgtctgtccccctagtcctggtatgatcaatgcagccctgtcccaaggaggggcaccttgggagtcaggttgcccttaaactaatctgtgaatacttctgtacagcctcttggcattcagttttgttctgctgtcattactaaagcccttcctgatacctcgtccgtcctctcttttctggctactaagaaaggtaacgtacaaagctttatcctttcctagatgcatagaatcccgcagctgtggcagcacgcccatgctgggtctctgacgagcatggtgttgctcgtgtcttttgtggctgaggggaatactgcatttgtactggatgtgttacacagtctgcattagcttcatccaagaagcttcagcttgaagagccagatgttttcacctaagacttagtttgttgctatcaacaggtgcttgtactatttggcagagcggtaaacattttccctctttcctacctcctgaatttcttccgggatcataaaatcacaccgaagatgatgttcatcatgtggtttagtggtaagtcaaatcttggataaatggggtggggaagtacctgttaaaagcacgccccatacagggagagctgtggttctctgctagcgcccttggcaaaaccacaagtaatcaatactcccgtttaatggcacccactgcaatcaagatggtgcccctcaccatggtgctatgaagtgggtgaggcttggttggaagagggcaaacaacatgcccagggtcacgtgaccactggaggcagagccgggatttctgccactctcttctgaacaccatagtgcagtccgggatgcagctgggcgtgcttcagcgcctccctgggggtcttctaggctgaagtaataatggtctcaaggtagaaaaggtgaaagttgaaactgtttcataccttatgttagttttggatatttttccttttagtcacaaagttctagtagtttaatttgaatgtttcagttgctatttaatcactttttaaaggacggaaatgatttcatacatctttgcttctaaagaactggatccataggcatccttaaatttatttttgagcaatacatactgttctttatgctttcttgcttaaatattataatcaaagtattttccgtgtgggttgggttatagcaacacactataatgttctctatccaaaggcatatctgcaagtttgtctcagatttctcttctttcaaaaggccatgtttaaaaatgtatatgtttcatatatatgtacgtatgtgtatatatacatatacatttatatgtggtgagaaaaactcatttttttcctaatctcttttgccagtgaggcaaactactttgtaaatggttgcagaagtgtgtcagaggtttttgaagtgatgtgggctatttgggaaggggggcatgaggataagagagcgttatggggaaggttggagtgtatttgaaatggcgggggctgtcggctcctgttctctcccaggctccccgggctcttgctctgtgggtttccatccaggctttcctggatcctcaacgaggggcactgaacaagcctctgctaccggcccctcccatcatcatttaagcaatcagagcttctcctccttcccacaaaacaccagcaacttcagccagagttcctcctcatgtcccccgcagctgtgtccgcacctcttttgccatggccagacccttgcgagtgagccgtgctcgctcattttctccacttcttcaccgcctgtccacggggctggaattggccttggcaggtcaccagtgacctcccgcagccagacctggaggggaggcgtccgcccccgtcctagcctacctccttcccactgcccctaccttctggcgaggaccacttcactctcttccccggcctctgggccatgctcctcctttctctcctttgacgtctccttgggctcgtcccccttcgctgacccctcaaatagtggcttcttcaggacttggccccagccccacttctgttcacgtgttctgcacttcactgagtgcgctcacccgtccactggccttcacttccacctagtcccaaagctgttcccgcgaacccagacctccctctgggatccgtactcctgtttccagctgcctgtttggatgccgtggggatgctgtcatccctatgcctttgcatcccccttgcccaagaaatcctactttgaattgcccggtggcctggctagccggtactaagcacttgctgggtacacaccctgttaaagcacattacatgtcccgtgtcactgaatcctctggcccgtgacaggtttagagaggctgagagtcccttgtcctcaccatgtctctgtattatgtgccctttgctcttgccctgccgtctccccatctgggtctggcctgcagcagcctggctgccctaccccatggtgatgtgagcctccccgctttcctgtctggggaaggtcctggtgctgtctgcaccatgcccccccccaccccccacccccctccccccaccatctcttccaggtagcatttcacaccccttatttgctgtgcctcctcccagctgctctaggagctccccaagggtggggctaggactgcctgtcccctccgtatggcaccaaggaagccaggaaacttctaacagaggaatgtgctgttttccagctcagtccatgcccctcagttgtgccctagtagcgtcacagaggaccagccagcctgtcattaccacctaagcagcccacagccccatcagtgccaccaggggcctccacagggacagcatctcgagataggaggggtactggacacattgcatcttgtgctgttgtgggtattagttgagtggccctgggcgggccatgctgctcttggcctccatccctcatctgtgtgttgtggacaagagtagcgctgctcggtgaggattcctgtgaagatccagtgatgctctgcacactgagcacctgcccaggcctggcgcacacacagggagggctcagcccacagcagctgtcctgcagtttccaagacacgagcatcaggcttgctaagtcctcccgcacccgcatctggggctctgtagctggggcaggccatctcatttgatctgccaatgttggaatggaggtgagtctgtggtcccatctctgccacctgctctttacaccccaaagcctcacagggtgagcacacactcttcagcagggccattagaatagtcagctggtcgtggtgctgggccggctggatttccagggaagccagcccatgaagctgctgcctcttcactgtgtcctctcacactgtttgctgtcacccaggcctgcggggagccatcccctatgccctgagcctacacctggacctggagcccatggagaagcggcagctcatcggcaccaccaccatcgtcatcgtgctcttcaccatcctgctgctgggcggcagcaccatgcccctcattcgcctcatggacatcgaggacgccaaggcacaccgcaggaacaagaaggacgtcaacctcagcaagactgagaagatggttagtaccatgcgcctgtgggggtggggcagggggctggcctgctacgcagctggtggtccccactgtcaggaaatggggagatgagccttgctttcttgctttgaggatgcccagcacctccacacacacgacacacacacacacacacacacacacacacacacacacacacgacacacacacacacacgacacacacacacacgacacacacacacacgacacacacacacacacacacacacacacacacacacacacacacacaccccccggtcatcccccctgagaaggaggtgacggaacttgagttctgaagcatggctcttggggtgggggtgtctggtggccttgtgacctgccgcagccatgggggctgtggacgaccccatctgctccctctctgaagctccatggggcaccacaggagtctggacctgtgccacaaccacagcagtgcctctgccctgccagcagctgagacacctgtcagggcccaggtttgagggtttcaaaatcctgtcattccccagtatggttttactaaaaaccacctgttgggggcctgaggaggggaggatgtcttgcggtggctgtgagggccgtgagaggggtactcccccaaggacagacatggtgtggggctggaggtacccaggccccagctgtagggagagctgaggttctgcagcctgcccacctcttcttcctacaagccaccgcccctgccaccaggctgccttcccgccctgtcttcaccctcaggacccctgtgcaaagctaggccctctgaccgaagcagaggctgctgtaggctccagcccagagcatcccctgctgatcaccatgcatttctggacatgcatctctttctagttcccgtattctaggcctcagtaactttaatcagtcatcagaggcccaggagtcctcacgtggccatccacggctaacactggagtcagggctggcaagaccatggcctccaatctccatgctcagctgggcccctcacccagtgcagtgctgctgggaggaaacttccagatggctgtgaggcctggctctgcagaacttccaccacactaagaggccctttgcccccaccccctatctaccaacttttttgtttttcacaaaagctctagcttaggcctttctgggtatcagaatcggtggggggcttgctacacacaggctgctgggtctcacaccagcatctcataggtatggtatggggtccgaaagaatttgtgtttcttcttatttatttttgagacagggtctcactctattgcacaggctgaagtgcagtggcgtgatcgtggcccactgcagcccagacctcttgggctcaagcgatcctcccacctcagcctctggagtagttgggactccagacaggcgtgaccccacccagttaattttttcttatttttagtagagatggggtctcaccatgtggtccaggctaagaatttgcgtttctaacaagttgccaggtggtgctgctgcagctgatcctgtgaacacgcttggcgaagcacagcactagcagaaacaggacagctcctctgaggatgaaccgctgagtttctggaatgttttctgtggcagtcagtgtgcttgcgttttccttggatgatctcagattgtccccatagcctgccagaaactggcgctttcattatacccactttgcagatgagaatgccgaggcaccaagagaatcagacagctgtgggcacagactcccgagcctgtcctctttactaccacgctgatcagcagtcctcaaaatgggctccccagactagcagcatcactggaaacctgttagatctgcagattcccaagcccattcagacctactgaattagcacctctgcaggtggctgcggtgggctcagtattttgtggtttcacaggccccccaggtagattctaatacagaccagtgtttgacaaccactgcttcacagcatctaaatgccctcccctccccggccatcctctgccctccctgcacctgccccgtccccctccccaccacctgcagtgaagctgcagagcacacttcactgtggccccactgagactcctccagcagagcaggcgctgcactcagagcctgtctgctttgctcctacctatgacccgagtcccgcctctttacctccgtctctcccctccacatggggtccttttcttcgtccctccccaattcctacaggatgtgttcctctcccctctcctctcttgacttgattggcaaaagcctgtccacggtggagtcctagctaatagagccacaggcaaagagacaaaaagcctccctgtgcgatttgctgctaatgaaaagcccagaacagcagttctggtcctggttgcatgatagaatcacccaaaagcttgaaaagcttaaagaccaagccccagcctggcccagtccttctgttttagctgtcctaggtggggtcctgggcatccattgtgccctgatggacgttcctgcctccctgcaggctcccaggaggccgtctgctgcccgtcaccctgcattgatggtcaagtggagttagggttggggacactggcggcctgggtggtgtgggggcttccaggaggtgccccccgatggtgccagctggtggccgtcgggccgcctttcctccctgctcagggcaacactgtggagtcggagcacctgtcggagctcacggaggaggagtacgaggcccactacatcaggcggcaggaccttaagggcttcgtgtggctggacgccaagtacctgaaccccttcttcactcggaggctgacgcaggaggtgggataccggccaggccacactttctgggggtcccttgcctgcctccttcaggacctgcggtggcccagggtggggtggaggaagagtggggaggcaggaaagctcacgtgggcccgccaggccgccgcctcccgatctggaggctggacgtgcttgtggaactcggcatctgctgtttttccttcgctgccacatttagtgcgaggttaataatagatttgttaacacagtttggttttcctggatgatagactcggggtattgatcagctactgaatcggagctgaggaatttcagacataccagggcctcaagctgtggcccaagtctgcccccagctcagggctctggttctgtccctcggggcactgctggcctctctttagttggaggccttgggtaggggtggggctcttcctgctgctgcccgctttgtttccgagcaggcccattttccactctccggcaggcctgagagctgccggtgtgtgcgctcttccaggagccaggcagctccagtgactgtgaccacgaccgcttccttctccagcatcctgtgcagtggatgcagctgtgtccctgacagctgaggagatggaggcctaagggggtgcagtaaccccgcaaggtcacagccaatatgggcataactgggagcagagctaactgtgtctgactccagagaccacatgttcagcctcaagccatgctccctcctcctttctgaatgacacctcccgtgacctccacccccacaaagaacaatcccagctcagtttgttcaactgaaactgaagttgcctgtggccatcaccctgcctcccacctcctccctagacaccccacacaaaacacccagtagcatcccctcccttccatggccctgcccctgacgccctgacggcttggttgtgtctctcgacccaggacctgcaccacgggcgcatccagatgaaaactctcaccaacaagtggtacgaggaggtacgccagggcccctccggctccgaggacgacgagcaggagctgctctgacgccaggtgccaaggcttcaggcaggcaggcccaggatgggcgtttgctgcgcacagacactcagcaggggcctcgcagagatgcgtgcatccagcagccccttcaagacataagagggcggggcgaggtactggctgcagagtcgccttagtccagaacctgacaggcctctggagccaggcgacttcttgggaaactgtcatctcccgactcctccctgagccagcctccgctcagtgtggctcctcagcccacagaggggagggagcatggggccaggtgccagtcatctgtgaagctagggcgcctacccccccacccggaggacccctgcggccccctgcctagaggagcaccatctacagttgtgccattccccagccactgccttcatgctgcccccgccggactggcagagccaggggtcagccacctgcctttgagtcatcaagatgcctctgcagccacaattctgacctaagtggcagggcccagaaatcctgaaaacctcccgctgccttttgtgatacttcctgtgctccctcagagagaaacggagtgaccttttgtcctttacctgattggcacttcgcagtctatctccctgggtagcagacggctgctgcccttctctgggcatgttctgaatgtttacactggtaccttctggtatcttctttagagccccctgcaagctgcaactctaggcttttatcttgcggggtcagagcgccctctagagggaaaagctagaggcacagggtttctgccggcccacaactgctgtcttgatttgcattttacagcaaagtgctgagagcctctagtcgcctcctgccatctgatctccctccccaccattcccgtactcagttgttcttttgtctaatcggaggccactgtgctgaggccctgcagtgtctgctcactgctgccatcttcgctgctagtcagggttccatcctctttcccctctcccagttccctaccacgttggatcccattcgtcacccatgctagggtccccaaagcactggggcaggggccagagcagcagcacccagtgctccctcctctactctgacctggggccccagcatcctggagcacacgctccacgcacacacaccccagccctgtcccaggggcctggccccctcagccatctcagggtgaggagctgccagtcatgtccagatggaatgactcccatcctctcctcatctcccctttgacgagcctcaaactgctcagctcatcaaagagccattgccaacttccgtatgtggttctgggtcccagggagccttggaacctggcaccctggggtggtttaattcatcattaagaagcattcctgcttctcaagggacacagtggcctgcatgggccagcatggaccctgggctgatcatgtgcattcctgcttctctggggacacagtgggcccacatgggccagcatggaccctgggctagagcaagcacatctccatctcttccacctcaggcagtgtggctccagatgtcaggagggactgacctcaggaccttccaggttcctctgtgccaggaatgagaggccaggcccgatcctaccacctcgccttgaccctgaagtcagagcaggccagccaagcaggaagcacactgtttactttttgcatgaaaagtaaatgtgtacttgatagagctaaaatatgatcttttttaatttctcaaccccataatttgagccattgccttgcttaattttggtttccaccatttccttttagtggagaagagaggaagtcagagggtagggacctttgcctgcccctgggcgagtgcgggcagggatctgagaccagattgttctcgcacccctgccagaactcactctcccctgaagtttagggtcccatctcccagatgtaagttgttttgcaaactcagtttgccaggatttctttctttcctaatcttaaattcacagataaagcaatgaaaagagtcagatcccatttccgtctgccccctcgtcaccaggtgtgatagccccagccaggtcacacctggcctcacactttgagctgagacttgaaaacgatgctgtggcggaagagcatgtggggcttggtggaggggccccaggatttgttgggggcaaagggggtggcgggaccgttcccaggaggtaccagcacctgcctcgatctcctctgagcctcttctgccccctgtcggccaggtgaggtcagcagcctgggagagtgcccccaagagatgagggcaccccgtgttccttggcaatcttggctcaccttggtaacaaaaggccatagaagtctgtttttctgggtcagttttttttgcctgagaataacaaattgctgctgtctacctttagcacacccaataattctatttggggcagtgaatgcatagaagatataaaaatacgcagcttaactatatcttcctgcgtgtgtatttattttcttctgggtctaggccatggtacaggagaactgtggcgtgtaggaggaatacttcaggatgagtgaaggctggagccagggagcgctggaggaaaccagccctttagccagcagcccctccaccacaggcactgctgtgtggaacgagttcttggaatgaatcccatgctttctgcagcctgtagttgttatgacccctcggaacaaccaccccgtggcttgtgtggggtctcgcagggaaaagggctggcttctaggtccccgagataagtgtgcagggggatgggccagggccaggctaagggtggctcagttccatcatctggaggtcagacacactgtccagaggcagaactgaagccctctcggcccctaccctaagccagccacccctcttcacagtgggtgagctgggctgggctggctggcatgaggccaaggggtaggcctgagcgccagagtcgcccaggttagcccacaggattcctttgtgtgccatggaatgctgaaagatgggtgactggggacccttcttaaaacctttggcaaaggtgccatcggcagggcttggcctcatgaagtctcaggtccgtgttcccgcagggcgcacatgcttggagagtcctcagcagggtagccgaggccaggccacttctgctgaggatggggcaggctggggtgtgggtgtggcctggggtggctcagggctggaactgctgcctgattcctgtgtggggagaagctcagtggccgtttgctgccactgacaaggatttcacatgcagaagagaaaaggcccccctccaccccccgcattccctgccgagtgagagccagtgtttgctgcccttgctgggggcgggtaggaaaccctgagcttcctgatgcggagtcatgaagcagagtcctcgggaaggcatctccacagccccgggtcctctgtctaacgccctccatttcacgccctccatctcacagtcaagataaaggcctcgagaataaagagccagcccccttccatttagtctcctgccgtttcccaaacagttgtccaacagttagacattgaggggcttcactgttaccaggcatgtaacagaaggaggaagactaacacacaccccctgccccatcccatccccctctcccgagctattttcttgctgtggcctctggtgcccttgagttggtctccccggctgctctgcgggggcttcactggcttcggagtgagcgcgaagtgctggtgagcagtgggcctgtgattggatgggaagatgtgcatccgtggtcaaaagtcagctgccagccctgcggaaccagagcctcaggctgggatggggaggcctccctgcttccacctgcatggtgggcatggcctggcttacaccaaaggctttgacggtttctccaagtaaggatctgcaaatcttgaatcgtcctcaaaatgacgaagcttgaattgtcctcaagatggatgtgaatcttacattccttttcatcatttcctttgtaaaaatgacgagtgctgggtttttgttttaagaagcattatgaaggccagacttactcatttttctcccccaagtgagctgcaagaggcccctgttaggcccctgtttcctgagcagtgatgtgctgctcttcttggtggggctttgggctgggaggggaaggcgggtcagagatgggggacctgtggctgccatgcaggagcccctgcgtcatctcgttggactctttaagggagtcaggaatagatgtatgaacagtcgtgtcactggatgcctatttagaaataaagtgtatgctgctgaattggagccagtgtctgtgttcatgttcaggtggctttgcagatgcacaggtcacacctcctagactgggctctgtggcacacagctacccagcccctgggccggtggcagccatgtcaccaggaagtacagtgcttaggagcagggctgggtcaggctggcctgcgtctggttcctacctttggccctcagtgaggagcatgtgaagctcagcccccagccaggctcagcttctcctcacgatgctgggagcccttcctccctgggttcgctggctgttcgcccaggctgcagggccgcctgacctcctgctcggggcttacagatcagtcccccacaggcctttgcctgatggtgaaatggggaaattctgtcactgaacctgccctgccgcaggagcgggggcatccatagcctctgatcagaagtggtggcatgtggggcaagaagggtcgtgagttcatctatacccccacgtacttccaaaggcatccaagctgctgaaggtaacaggcacgaaccaaaaatgcatgtgatgtaaaatgaaaccagtcaggagaagctgtcctggccccagccagggggcaagagctgagtttcctggttccttcccacactgtgcttcagcccaccccaggggagactcccgaggccacagtgggctccccgtggcccgcttttggtggaaacccagattcagagaaatatttctccaccataataaaaactgcaagtgtgatgagaagtggtagctgacacttggcctcagtgtcagggaggcaccacgagagtgataaggactctggctaacagcagaattttccaggccagccctgcctgcgagggcggctgggaagtggagctgcgctgtgctgagcagagtgtcagctgggacggaacggagtgctggcagcaaaggtggggggtggtcctgagtgggcacctcgttcccacggaacagggtatgtttcatttgtatttcaaccttctcaactcctaaaaaaagctctcagggtagaggggagcaatcgaggcaagaaatattttccttagaggctagaaagctggcggggggttggagggtcacacacaaagttgagggtcctgtaacccccgcttattattccacagggcactaggggaatgaagctggcctggagcggggccccactgcctcttggaggcaacccccccaccccaagcaagggacaacacagccctctggctctagccagagaagatgtgagacatgaagggcagtgggggtcaggggccaggggccagtacagtcatctcaaggccctgggtgacagtaagtgccccgtaaatgagggtcctctttgtgaatatttatggacctgcaggagagcaggcaggcatcagccacactccccctgcctggggaggccgcctggcagacctggggggtcttagcatcagttgggaccagtctggtgctggggacagaaggaacctctgcgcatacaggcagctgccagctaataccctgatgtaaatggggaagaaaataagtctttgcttacagaaaaaaaagggcacaaaaatgtagttggttcattttgtggcgaagatgagccatacgctcctatctgctggtgggagggcagctggctcacactctccagaggacactgtggtgacagctctccaaagcctgaaaacggcccagcagttccactcatggggcaaaaggaaagtgcatgaaaaccgcactccaagaatggtcatcccggcaatatctgaatgaggataaatggaaaacaacttccttgtccatgaatgagggactggtgagataaatgatgatagaatatttaccaacagctcaagattctaaggatgtggaaaaatgtttagaatgttatcagaccagcattttaccacctttagggagagagaaacatttcaccctctccttaaatgctgtttgagattttaaaatgactaaaaacgaaagtagaaattttagtacatccttttatacaaatacacatactggcactccagcgcgcacccattcatccctaatatggaagacctggtggttcctttcaaccaccacttcttccccgagccctgttgtctttgctaagagaacccatgtggttcgtgtaatgggtgactgtatgcttcaaggggaaacagagccagttctcggttcaggttgttcctggtcattccctctacttgtctgagattggctgaggaatgggtctgtgaccttatttggcaggagaatgaagcgattaaaaaaaacaaaacaaaacaaaacaaaacaaaaaaaaacgaagtctcgctctgtcgcccaggctggagtgcagtggcaccatctcagctcacggccactgcaatcttcgcctcgtgggttcaagcgattctcctgtctcagcctcctgagtagctgggattacaggtgcccgtcaccatgcccagctaatttttgtatttttagtagtgatggggttttgccctgttggccaggctggtctcgaactcctgaccccaggtgatccgcccacctcggcctcccaaagtgctgggattacaggtgtgagccaccgcgcctggcctgaagcaatcttttgaggaatttctaaaactttccttactctcaaaaagacactcaaggaagggacatgttctcttcccattgtctgacctttgcctcccattacttgaggatgtaatgcctccacctgctgcagccatttggagaccaggagggaacaccttgccaccatgctgaggatggcagagcagaaagacagaaggcttgtatgttgtcaaggacactgctggagcagttaattaaccagtcctggaactgacctccctctggatctcatgacatggggcaatacatgttctgtatctgccatttctggttgggtattttgttacaacagaaataatgctgttataacttcatgaactgagaaaagcagatttcagaaccatatcaatagatgtggctctataaattaaattagcagtatgtgtatacaggaaaaaaatcttaaaggatagacatagagttttaacttaactttggttctctccaagtggaaggattataggtaaatttttttttttttttgagatggagttttgctcttgttgcccaggctagagtgcagtggcacgatcttcgctcactgcaacctccatctcccaggttcaagagattctcctgcctcagcctcccaagtagctgggactacaggcccctgccaccacgcctggctaattttgtattttcagtagagacggggtttcaccatgttgttcaggctggtcttaaactcctgacctcaagtgatccacctacctcagcctcctaaagtgctgggattataagcatgagccaccgcatctggccgattataggtaacttttaaaatcttgctgtttgcatatactttctatttctctcataaagaatatttattaagtcaataataaggaacacacatgttctttgaccagaactagaggagcagtgcattagatggagtgacttgaaggcccctagggaaacaggtgagggtccaaactgatgcagtcaccacggagaggcctgtggcccttccacccacgattcctcttctagccctggggcaaagattggcaaattactgcctgtggcccaaatccagcccgcctcctgtgtctgtactacctaagagctaaaaatggttttaacattttttaaaggttggggaaaaaaacagaagagtaaggccaggtgtggtggctcacacctgtaatcccaacactttggaaggccaaggtgggaagactgcttgagcccaggagtttgagaccagcctgggcaacatagggagaccctgtctctctatatataattaaaaaaaactagccagcatgttggtgtacacctgtggtcccagttactcagaaggctgaacccaggaggtcaaggctaaagtgagctgtgatcgtgccactgcactgtagcctgggtgatagaatgagaccctgtctcaagaaaaaaaaatcacagattcacaagaagttgcaaaaaagatagtacagaaaggtcccatgtacccttccccccgttaccctcagtggtaacatcttgcacaactacagaatagtttcacaaccaagaaactggcattgccacagtccacagatcttgttccaacttcattagttttacaggcactcgtgtgtgtgtgtgtttagttctacgcaattttatatcgtgtagattcgcataaccaccatcacagggaagttgccttttatagaagtattccagctgccaaacaaagaagaaatcattgaattggaatatctctattttgtaacttccagtgaaataatggatctaagtgggaagtaacagccttaatagctgctaattccccaaagggagagaactcgacataatatgcctcctgatgagagaatacgcatcaagtattcttaccacagagatcagacccaaatccaagcaaaccccaacagccagctaccatgcaatacatgcacacattcaacaccctttcacgatcaaaacactcaaccacctaggaatagagggaaactactgcaacacaatacaggccatctaggataacagctgacagcatactcaatggtgaatgactggaagcttatcctctaagatcaggaacaaggcaaggatacctacattcaccacttcaattcgacgtagtactggaagttctagccagagcaattaagcaagaaaaccaaagaaaagataccctggttggtaagaaagaagctaaaattatctcatggatgacatgatcttatatgtagataaccctgaagattccacaagaaaaaaactgttcaaactaataaataaattcagcaaagttgcaggatacaaagtcaacacacaaaagtcagctgcatttccataaacagtggacaatcagaaaaggaaattaagaaaaaaatcccatttataatagcatcaaaaagaattaaataggaataaatttaaccaagcagcaagaaagacttgtacactgaacactataaaacatgctgaaagaaattttaaaagacacaaatagggccaggcatggtgtctgacgcctgtaatcccagcactttgggaggccaagacctcccaaatcacttgaggccagaattcaagaccagcctgggcaacacagtgaaaccctgtttcaacaaaaaaaaattaagaattagccatgcgtggcacatgcctgtggtgccagttacttgggaggttgaggtgggaggatctcttgaaccaagagttcaaggctgcaatgagccatgactgcaccactgcactccagcctgggtgacagagcgagaccctgtctcaaaaaaacaacaacaaaacgatctatactgcccaaagtggatctacagattcaatgcaatccctataaatggcattttttacagaaatagagaaataaaaccatcctaaaattcatatgggatctcaagggaccctgaatagccaaaacaatctttaaaaagaacaaaggtggaggcgttacacttcatgatttcaaagtatattacagagctacagtaatcaaactagtgtggtactggcatgaaaacaggtatacactcatagaccaatggaatggaatagagagcccaaaaataaaccctcacatatatggtcaaatgatgttcgacaggagtaccaaaaccactcaatggggaaaggactgtctcttcaccagatagtgttgggaaaactggacattcataaggaaaggaatgaagttagacccctaccttattctgtatacaaaaattacctcaaaatagataaaagacctaaatgtatgacccaaaactataaagacaacttaaggggaaacttcatgacattggatttggcaatgatttcttagatattataccaaaagcataggcagtaaaagcgaaaatagacaaatgggattacatcaaacttttttttttttttttttttttgagacagagtcttgctctgttatccaggctggagtgcagtggcgcaatcttggctcactgcaatctttgcctcctgggttcaagcgattctcctgcctcagcctcctgagtagctgggattacaggcatgcgccaccacacccagctaatttttgtatttttagtagagatggggtttcaccatgttggccaggctggcctcaaactcctgacctcaggtgatctgcccacctcagcctccgaaagtgctaagattacaggtgtgagccatcacgcccagccgactacatcaaacttttaaatttttgcacatcaaaagaaataacagtatgaaaaagataacctatggaatgggagaaaatatttgcaaatcatgtatctgataagggatcaatatccagactatataaagaactgcaaataaaaaacaaaaaatttacccaattaaaaagtgggcaaagggctgggcacagtggctcatgcctgtagtcccagcactttaggaggccgagataggagataatttgagcccaggagtttgagacaagcctgggcaacatagagagatcccgtctctatttttaaaataacaaaaattaaaagtgagcaaaggacttgaatagacatttctccaaagaagatatataaatggccgaaaagcatatgaaaagatgctcaacatcactaatcattagagaaatatgaatcaaaacaataagatatcatctcaccccattaggaaggctgctataaaaacaaacaaaccccagaaaataacaagcgttagcaaagaggtggagaaatggggactcctgtgctgcaggtgggaatataaaatggtaccgctggccgggtgtggtggctcatgcctgtaatctcagcactttgggaggctgaggcaggtggatcgcttgagtccaggagtttgagaccagcttgtgcaatatgatgaaaccccgtctctactaaaaatacaaaaaaattagccaggcatggtggcgtgcctctgtcatcccagctactccggcgactgaggtgggaggatcacctgagcctgggaggtcgaggctgcagtgagctaagatcatgccaactgtattttagcctgggtaatcggagtcagactctatctcaaaaaaataaaatatattaagttcaggtgtacaataagaaaattaattaaaatataaataaaaatgataaaatgggtacagctgctatggaaacagtatggagactcctcaaaacattaaaaatagaacgccgtatagtcctgcagttccacttgaaccgcctcctcctcctcacataggacctgaaatatgttaccagtggagattcgcatgtctgaaaacctggacctactcccatcccttaagctcacccctgccttaagtgatttcctctcatctctcatttatgaagctgcagccttgaatcattcccataagaagtatttatttttctacttttgcacaatatgtgcaaataaacagtaggaaattggaggtaaacagagagaacaactactcccagtgctaaaacaacaagcaggctgaagtaaacatttaggctctggcaaactctaaaggacaaataatccagtttcctcaacaaacacgtcgcaagaaaaaagttagatgtgaaggtaatactgtctcagcctgttcaggctgcaaaataccacagactgggtagcttttatacaacaaaaatttatttatcttagttctggaggctgagaagtccaagattaaggcactggtagattcagtgtctggcaagggcccaattcctggttcacagacggtcagctcgctgggtcttcctgtgctgggagaactccattctcttcagccccttgtaagggcacccatcccattcgtgaaggccccacccacatgacctaatcagctcccaaagtgccctcctaatacaagcacactggggggattagatttcaacgtttgttttttcttggggggacatatgcagtccgtagcaggtatcatgttttaaaagccctcgtctcttagataaacactgaaaaattcacaaatgagacagacatctagaatttgcttcagaagagttcaggagtaggaaagtggatggcaagggtagagacaaaaccagattggccacaagttggtaactaactgttcaattgctgaagctgggattcattatactagtatcacttttttgctttttttttttttttttttttgagacagggtctcactctgctgcccacgctggactgcactggtgccatcacagctcagtgaagcctggaacttctggcctcaagtgatcctcccacctcagcctcccaagtagctggggaccaaaggcatgtgccaccatcccagctaatttttttttaatggggtctcactatgttgcccagattaggcttcatgtcttttgtaaacaaaaaggttttaaaaacagacaaattaggccgggcgtggtggctcacgcctgtaatcccagcgctttgggaggccgaggcgggtggatcacgaggtaaggagatcgagaccatcctggctaacatggtgaaaccccgtctctactaaaaatacaaaaaattagccgggcgtggtggcaggtgcctgtagtcccagctactcaggaggctgaggcaggagaatggtgtgaacccgggaggcagagcttgcagtgagccgagattgcgccactgcattccagcctgggtgacagagcgagactccgtctcaaagaaaaaaaaaaatagacaaattggggcttaagtgagataacagtttatttttcatataacagacctagaggcaggcagcacgggcaggccatgggggcagcttccagagcatcagggccagctgctgtagctgctgcccaccccttcctcgcttggccccctcagcttcatagagcagctccatctccagccatcacagccattccagccaggaagaagggctgggtgggaagggcaagctcccttccttgaaggccatgcccagacaccacacaaagcacctctccatccagggaccagacagtcatctgaccacacgtggctgcaggaaaggctagggaaggcaatctttactataggtggccacagatttgaaaaccggggcttctactaccaagggggaggggatggagactggggtacgatttggtgtctgccacagctctcatccctgagattggtaatctagcatcctaggtgccacagatcggccagcagagctaatgctgtccagctggtgggcccaatgaggtttaaatatgtttgtcatttacatgtacatgtaatgtacatgaagcaatctgctctgaagtctctgttcccttttggatgcggagcaagcacctggcttccttagctctcccagggtaggtgtgcgtctccaggaaactgctacccccgacagccagggtggcaatgccgtttcctatgctatagctcaaagcaatccagcacctgagcctggctttggcccaaggcctgggtatttgttcagccagcaaatgaaatggagaaacctgttcagtgtctgccctgacagctgagctgcctggtgggagcccacacagcagcgtggtcagtgggtgggcacaggcctgctgctgctgccttaagatttctgccatgtattttgcttttaagtcaatcctcacttaagaaaaaaacaccttttttgttttgttttgtttttccaagatggagtttcactcctgtcaacccaggccggagtgcaatggcacaatcttggctcattataacctccgtctctcgggttcaggcgattctcctgcctcagcttcctaagtagctgggattacaggcacccgccaccatgcccagctaatttttgtatttttagtagagacggggtttcaccatgttggccaggctagtcaacctcctaacctcaggtgatcctcctgcctcggcctcccaaagtgctgggattacaggcgtgagccaccgcacccggcccttaaattgatttttaaagcaaacctatcactgttacaatggaaaagtagtatggcctgccctagaaggtaacaaaacctggctaagagcctgccacacgctgtgtctgatgccaggtttctctgttaaagacaaggtagcatcgaactgactccctcctcaagacagttaaatggatggaaaaaaattcaaatggaattaacttttaaaaaacatcttccaatgttattaatgcctctttgtctctactaacaagcatttctcctggatgatgcagtcccctctttgggaaacatctgaactctgtgtaccgccatttccccatatgtaagatggagatggtaacagtgcctatttaataggatgactgaagctagtaagtaagatcatgcacatagtctcaggatacaaatgcctggcgggaggatcactcgagcctaggagattgagaccagcctgggcaatatagtgagaccccacctctacaaaaaattaaaattagccagacatagtggtgcccacctgtagctacttgggaggctgaggtgggaggatcactcaagtccaagaggtccaggctacagctagccatgatcacacaaccgtactccagactgggaagtaacagagcccgtcttaaactaaaaaaaaaaaacatggccgggcgtagtggatcacacctataatcccagcactttgggaggccgaggcaggcagatcacgaggacaggagatcgagaccatcctggctaatacagtgaaatcccgtctctactaaaaataacgaaaaattagccaggtgtggtagtcccagctacttgggaggctgaggcaggagaatggcgtgaacccaagaggcggaacttgcagtgagctgacatagcgccactgtgctccagcctgggcgacagagcaagactccgtctcgaaaaaaaaaaaaattttttttacaaaaaattaaaaaaataaaaagtgccaggctcgcagtatagcactcaaatgctatttgtcagtttcatggaagagaaaatttaagtcttgtcattaaaaaactaaatacagcttaaggaaaaataaactcccaagtaaccaaacttcaaagcagggccaggggacataaaaccccaaacacttcatttaacaatggaagacactttattattattatttttaatcatctctcaacatttcaactcttggtagaaatcaaatgtaaaacatctgcatttttaaattagcatgtatttaactatctcaatcacagcaacctcatccagtaagatgcacacctgggagcagggctgtagtatttcgtattccagtctgtgaccacagtgcgtccgtgatgacaggtacactggactttccctcctaggatgtgttagtcattcctgcttttgtccatagggtaagttacgtggcatcacggttggttagaaagagttagttactgtaatgctggcgcaatctggaaatggaaaactagaaaactagagctctcaggagtgggccaggcattgccgattctgaaatgtgaaaaggaagaacatcaaagatgaatgccctgctaggctggtcttagtaataaagttggttgaaattcagcttaatatacacactgtacatctacatgtgatctaccagatagatatatatatatatatatatatatatatatatatatatatatatatatattaaaaagagagccatagaagatttggaaaaccttaaaatcactcaactgagttggaagaacatcagcaaattcacagtggcctcaggattcagccagacttaaacttgctcaagagctgaataactttctcccagaaaagcccactgcatataaatcccttaacattgtgtacatcacaaacagttatggctaaaatatagttagttcacaaggaagcggctttattttcaaactcttgccccactcctgctcttgtacccccacaaggaaaatccaggggttggtaattcacatgagaagctgaaggggccttcaggcttggaagcgcttaggcttagctgagcatctgaggagccgtctctctgatgggcacatgccgactcctgcccacttttagtgcaaaaagattgcaaatgttgcagatgagtcctggaaactggtgaagagaagaggattgagatggaggggcagtaggaatcccaaatgattttccttctgaaacgagactcaagaagtgtgaagtgcaaggttcctgctcagcaagctataggtccgacaggtgaggtccctgaattgtcataggttagcagtctgcagacacacagacctcgacacccgcgctcaccccctaagtgcacactggaggtaggtgtatagatagttactgcagggaagacagtggctctccaccagctcaagaaaaggaggcttcatgtctgttcctccctgccccaaactctcctctcccctcgggccatagtgagtggaggatacaacacgaatgggcgcgaggccctcccttggaagactaaagaacccagggcatttaataaatagctacataattcatttttttaaccacgttgaaacacacagcaagttgaatatttatttaaaaataaatctcaaaaatatctattgacagtacagtaagaggggcatgtgcaaacaacagaaagggggaagtcagtcctgctgtgggaagcccacacatcagtgtgttggagcaaagttcacgaaggccatgggctgactgagctgtggtgtacgaaatgacattcagctaatactggactcggttcacctttgacacctggagaggtggggaagccagggggtggggagtccagctggggatccttgtgtttaggaagggggcggccaagggatgagcctttgggagaggccccgtgtggcaggagggctcatttcacaagccaacaggcctctagctcgccgctccaggtggatgtttggtgacctgaagggcccttcccagtccaagttggctttgcaatgggaggggtaggtgcagcgagggtcccagagacagaaatcctctttaaaggaaaaaacaaaacaacaaaacaaaacaaaacaaaaccccaaaaaaagaaccaactgaacagggagtggagagattagcaaaatgaatctgaacggaagtgccaccttctcccttgtcagacaacaaagcagccattggttgagatatctgagtcgctaagtgaactcccacgtggacacagccagcccacgatctctgccacctacatggtcaagtgcaggcctccgcctctgagatcaatgcgttagtacttcttcaccgtgaaacccgaaaggtcggttgatgtagcccttggagctggaaggggcgaggccggtctatctgtacacgagatgggagagctgggtggacttgtagttcagctggttgttgggcatgaacttgtgcagctcactctttttgtagcaggggtcataatggtaagcgctgaggcaggcgtcacatgagacttttgaacactgggtgcaggtgttggtggcgcctgggcggttgcagaagccacagcgggaagtgggcgtggtggagggcttggatttggagtgaaggtgcgggaggcggtcgaggccctgagtctggcctgggtacttctcccgcagagatgccccgtgggccaggctgtcatgagtcgaggccttgctggggaaggcgctgggcttggaagctggaggacaggtgagcaggctgtcacagcgctggcagagggaggagctgcaggacagcccgcagctttggcacttggagagggcggactctttggcagggggcgagcgcttgtggtagagggagtgggcatcgtttctgagcagccacacatccggccgcagagcatcctgccgacggtaggtggccctgggttcagagtctgtgtacagatccacgtcatcctgagtggagaagtaggtaccgcgcagcagggccgggccgttgctgggggaggcgggtggaagcacatccgggctgccgtggggggagctggccatggtcagcagcgaaggggatgggcggatgatctcatccttgaggtcgtcccccacatccgttgccacaggctccttccgaagactcaatgaggccttcaggggtggcttccggctctcccagtagctgtcataggcatccactgacctcgagggcttggtcacgcggggcttgtagtagtccttggccgcccgctcgctggccgacttctggagtgccactcgtgacatggaggccgtcaggtgctcccggccctctgcccgccgccgcagggcgtccgagcagccgcgcacatcctctgcactgctcttgcgctcgctcacaatgtccagctcggagtagcccttgtccttcacttgtgagtggatttctagcatctgctcacactcgactttggccagaaagagctcaaaggagaccatcttcacctggagggtctccacgagctctctgagcttgtatgcagtgcccagctcaggtgtgtagcccatgcagctcaggatggctcggatgtcctcttccagtaatgtcgacttgacataataaacaaaagggcccgtgtaggtctagaagggagggagtagaaaagaaaggtggggttttctgtcagagacacaagacagagactatgtcaaagcaaaggatgtccagctctgaagtggggcggcggggagagggcagggcagggaaggatctcgacagcctcaccctgcgggaggcagaagacgcaggagctggggcttgctaagcactcaggaattgtgcaaggaaatgacccagcagctcctttcttttgtttgagacggagtctcgctcttttgcccagggtggagtgcggtggtgcgatcttggctcactgcaacctccgcctcctgggttcaagcgattctcctgcctcagcctcctgaatagctgggattacaggcgcccgccaacacgcccagctaatttttctgtttttagtagagatggggtttcaccgtgctggtcaagctggtctcaaactcctgacctcgtgatccacccgcctcggcctcccaatgtgctgggattacaggtgtgagccaccgcgcctggcagcagctactttgttaaacacaggaagcaaaacctctcgcttcctagtggggcacgaagactctactccatatgaagagagagcctgggcaaacatggctgaataaaggggccagattacaggcagaacgcggtgacaatcagaacgttcctctctggtatttccatgaggggctgagtaacacggcagactgaagggcctggctaggtgacagctctcctgtgccatcccctctcttgattaccactcctcccatggcagaatgaagaagcctggctaggtgacagctctcctgtgccatcccccgcgtggtctgattcaggatccctctctcaattccccctcctcctctactgttcccacttagtacagaacacccctcagcttgctgggaccgctgagaagcttcctaactgctctccccatccctcccacctccccccacccctctacagcctacttcccataccacagccagaatgaccctcttcagatgcaagccagatcccacactgcctccttccccgcctactcagaacaaatccaagccttgccctgggccacaagaccctgcataacctggctgcccctgccttcccagcttctctgcttaaggtgtggcagccgggccagaaacggttcagaggtgatgctggagagacggggaaggttcggagcccggaaggatctgagagcacaggatggatgggatcagactggcatagcctctcaggagggactgccaggggcaggaagagagaaggagggcctgtatggaggctgctccaggacctcaccttgatgcttctgaattccttcttccacgggtagaggaagaggttgatgcccaccgtctccagcatgctgaaggcgccgtgcagagcccgcaggctagaggagctgagcgagcgcaaggagctctccaccacctcatagaactggatcagccggaatcgataaaagggatccaccttgtgcaggctgagcagggttgaggctgccacccgcaggcactcatcgctgccaggccgctgcctgctggtggtggtatccactttgctctcatggaactgcacgtacttccgaaataagtcatccttgaatttagtatccattgaactgggcttccccatccgatcgaggggggctaccttatctcctccatggcttctggattagaggcagggacatcactaaaagcatggacatgttgccgcctggaccagcggagtgctctggaaggaggggaacaagaagcatgtcattcctcgatacggtcgcgcttcggcttcaggtcgctgaggcaaaatgaacagcagaactggcctgggctacactggaccccagcagcacactacagagcatgtactacaagcagggttacaacagaggccagagagagatggaccttgactttgttgtgctcacaaatgaaaaatacgattaatattcctgaaagagaaattcgggtgagtacagcaggagctcctgtcctggtttcgttggggaagggcgagtttaggaaagccctcttgagacagcaacagacctgaaggatgaggagtctgccaggccaagaggccggggaaggagtcgcagtagaggaaggccctgagctaatagtaccagaggctccagacacgtgacgagcttcacacacactaactcgcttactttttttttgagatggatccttgctctgtagcccaggctggagtgcagtggcgtgatctcagctcactgcaacctccgcctcccgggttcaagcgattctcctgcctcagcctcccaagtagctgggattacaggcacctgccaccacgcctggttaatttttgtatttttagtcaagatggggtttcaccatgttggccaggctggtctcgaactcctgacctcaagtgatccaccagccttggcctcccaaagtgccaggattacaggtgtgagcccccatacccagcctcactttttcttcttaaacaatcctaggagagagacgctacaggcagccccagtggaccatgtgcaaactgagacacagacattagaaactgctcaaggtaggccaggcacagtggctcacacctgtaattcctgaactttgggaggctgacgggggaggatggcttgagtccaggagctcgagaccagcctgggaaacacggtgaaaccacgtctctacaaaaatacaaaaaaatttttaagaaaaagaaactgtccaaggttatagaactctcaggaggcagagaagctgagctcagaacccaggcaatctggctccaaagtccatgcccttacccaccacaccctgctttcctgaggcaggaagcctggaacagtaacagaactgcagccagtgaggccgaggccacgagggcaggggcatgaggagaggcagatgccagcatcagcgggaccctcagccccaaggccgcaagagcacattcagaattcgatattttatacaaagagccacgtgaagccactgaagagtttacagcgaggggagagagatacggtcttatttacaattttcaaaagaggccaccgtggctaccggcccctggagtgctgttaccggcctttgacagcctgcggcccctttatcaccagagcgcttgacagccccctgttgggagaggatagaatgttctgagctgggacacaggctttacacaatcttgtcatctgcttagccacttgttagtagaacaggcacagatccagcaatattcttgtcaccacaacgctgggagcgaatccggattaatggagggacactgccagggccaggggagacaacacgcgcagggtcacggacacggggtccaaggccaggcacctgcgagtgaggccagggctgcttctccaggttacttgggcaaattgctccacctccctgggtgtcggttttctcctataaaacggggttaataatagcgcctctgtccagagctggcgagaggattatgcatgatggaatatgaagctgctcagagagccggctccgggaagtccttgatggccattgctgttgtctgaaggtgctgtacccctaagtggacaggccttctctgagtggggcaaatacctctgactgggtggtagatgtgcattttcacatgctctggtcctgctgctcctgcccagaagctccgtgggtgcaggcctgtgaccatcttgctcagtaaggtgacctgtgtgcttcatgtctgctgagtgtgggagacagcaaggggctgagagaagctgcagcaggactgggcctggcatgtgggggactcctttagcagacctgtgttcagctaggaaggtcctacgagcccagcaactatcaggaggtcaacaaaatcatcctcatctcaaagagccagtagtctggctcctccacagattttgtccccaggaggagactcctgggagtactaatggtgcggtgagaggtgggatgtgtagcaaaactagggacacagagaggccactgtctccaacacactgcactgctgagggagcccagtgctacagtgacaaataaggctgaggagtacaggaggcaaacacatccatttaggggccaggtgcgggggctcacgcctgtaatccctaaactttggaaggccaaggcaggaggattgctcaaggccaggagttcgagaccagcctgggcaacatagcaataccctgtctttacaaaagaaaacaaaatccacttgggataaaattctgcttcaggaagattctcatcattcaggcctcagctcaaacatcagcctctagaggtaccaccctatctcaccttcccagttccacactgtcacattctcctacgataaccacaatctgaaactatcaacttcattcattcattagcttcctctctttgtccacccctcaccctccctggtaagctggtaagctcgtggtaagctccataaaggcaaggaccatgtctgtgttgttcaccacgatgcctaacacagagcctgcctgtgcttgataaagtaggtgaaatggatgctgcagccaggcacggtggctcacgcctgtaatcttagcactttgggaggccgaggcaggtggattgcctgagctcaggagttcgagaccagcctgggcaacacggtgaaaccccgtctctaccaaaatttaaaaaaaaattagacgggtgtggcagcatgcgcctgtaatcacagctactcgggaggctgaggcaggagaattgctagaacccaggaggcggaggctgcagtgagccgagatcgccccattgcactccagcctgggcaacagagcgagactccgtctctaaaaaaaaaaaaagaaaaagaaaaagaaaagagaaaaagagaaatggatgctgcaaaggatgtctgcattcacgatgccatcactttagtttctcattggtacctcccaagaatcctgggagatcagctggagagcaaagaaacgggctcagaaagatggcatgaggtacgacaagtagctcaaggttagcagatgatggacccgataatccaagcctggccttctgacttggaacctgtattcctctcaccaccccacgattcccatgtccagcaagcatttctgcagcccccaccctctgcctgagctggacccagtcggggaatggggatgggtgggacaggtagaggacagcaataaaggagacacatcctgcctgcagctctagctggaagagcataccacctagtatcaaagtaggtatgtgctctaacttcatactgttctgtccataaaaaaataaacaatttaaaatgtatattctcttaaaaaataaaaatgcaggccaggcgcggtggctcacgcctgtaatcctacaactctgggaggccaaggtgggtggatcgcctgagattgggagtttgagactagcctggccaacatagcgaaaccccgcctctactaaaaatacaaaaattagctggacgaacacctgtaatcccagctactcaggaggctgaggcaggagaatggcgtgaacccaggagggagaggttgcagtgagctgagatcgtgccattgcactccagcctgggcaacagagcaaaaactccatctctacataaataaatgtattgcaccactggagaggatagtcacacatgcatttaccattcttgacttatctaagagaagctgccatcacgcctctggccccagggtctgttttttggtagtctgagaaccattcaaacacagagacattaagcttccgaatactgctgtaatttttctccaaggaagtcagccttgaactcaaagagactgattttttacaaagtcagccagtctcaagctcggctcagcgtctgctgctctataatcgcaccacagtccacacccttgtttgttgctgaaaaacaataaataaaggaaagggatccaaacagcccagctgatgttcaaaatactcacaataaggacaggaagcctatctaaaacaaatctcaaaccaacctgggtaggtgagggaaaaggcggaagaaagtaaaagctaaaagataattaagggcaagacaagcctggacaacatagttagactccgtctctacaaaaaaaaaaaaaaaaaaaattaggtgggtgtggtgacacccacctgtagtcttagctacttgggagtctgaggtggggggatccactgagcccaggagtttgaggctgcagtgagctatgatggcaccactgcactccggcctgggtgacagagcaagaccttgtctcaatcagtcaataaggaaaggaaagaaagagactaacaattactgaggttctactatgtgctaagcattgggcttcccactttacctacatcatcccatttaatcctcacaactctataaggaaaacaggctcttcccattaaaacaacctgcccaacagagtttgaaagggtcagagctggaatctgaactcttgctgggaggcccttgatgcctgggctttctccaatttacctcactcatttattgttacatcagtaccatttaccaagggattactgtgtggcatccctctgctaactgctctgtgaaaaccaatgaaatccacaggatagatccaaggttaaagaggaaactgaggctcggagaggccaactcacttaccctaagtcgtaaggctaggaagaagtggatctgagctctgaacctaggtctaacgccaaaactccgactcttgcaaagccatcctgctgcatctgctggacagctctactcgaaagtgtttggctaagttagaatgccttatggcggcgcgagcagagttgagttacaaaaattcctgtagtagcaaaattcccatcttcccacaccgaatggggctaggagagctaatctctatatgatgtaagctcaagggccaaggaaagaggctggtcagagacatcggccagtgatgaagcagctgacatcatccctgctgaaaacattttctgagaatacaagatgccttgtagctggtcatagctggtgttttttctgagcacagagccagcaattcattcccagcactctgcaagaacaacaaaatacgctctctgcaaaaacatcgtggttacaggagaccgagacagcccagcgacagaagctgctaatttctccaagcaacccaaggattggaacgccaagccgtgccagtctggtggaaaaaaaaaaaaaaaaaaacccaaaaaacaaaaaaacagcactgtgaatatcctgaacacagagacaggcaggtgcccagagtcaacggctccagtcagcacctcctgcacccacaatctaggtaccttcttgaaaagcaagtcaatggaaaaagagatattgcacagtcagggagccagtggcttctttagttattttttgaacatctaagaggaaagctgtatctgtttagagtcccactgcatggaagtgaagtgattccgagtagctaagcattagcttggctttacctcagctggcccattcaagcagaaatgttccccaagcagcatttgaaggcgccccctctctgcacaggcagacctattttggtctgtgcactgcccctgtccacaggtttacacatccctggtctagctccatcagcctccaaacaggagacggggaagtcagttcaaccccctccacctccccacccacaccaatgcactcgttccaagcaagaggctccgagaaacatccaaggcaccttccactggctgtgaaacaccagaaggtccccacactcctactagattccaaagaaattcacacagagtccttccaaacctctgaaaataacctcagcggtgctgaaagaagcttccctagtggcagctgcctctctcggagaagctctgaaggaagctgtttccctccctgcaggggacagaagctggcggctgctaagtcccagctcggtcattcctacagcctcggggggccacgtcagttgtgaaaaacagcccagtctcaaattctggccccccctacggcttcgtgaattgaatgaagtaacaggaactatcacttattggacgcctgctgtatgccagaggccctgcatgatctcattccatctccactccagccctagcaaccaggttcaatcacttaaataggcaactgaggctcttaagatgaagtgacttatccaaggtcacacagtgagtacaaacccaggtgtgccgccagagcctgaactgggaacccctgcgcggtaactgcctcgtggcgaaatcggggtgtccttctgtttggccagtcgccgaagaggggtgttcctcttgggcggccctgagccaccctcggcgggtcccaggagcctgcgaggcagctcccgggagaatgggggtcctgaggataggctgggggtcccgggagcgccgaaacagcgggcccacctgtagtcctgcctgccgtgagggtaccccgctcccgggccagccgagccctgccgctgtctggcgccccctccgcctggggaagccccgaaggcagtttccgcccgcggccgcccgtcactcaccctgacactgccgccgaggacggcccggccgagggaagcaagcgagaggcgcggctgccgccggagccgggccccgtcgggctctagcctctccggccggctgcaggggtactgagaccagtacccgggggccagcagcgacccggaaacactcggcccggaaatgatgtcaccatgaggcgggcccgaagagagggtggaccacggctgcgcgctggctccgggaagcggtcgatgcccgcggccgacggagactacaacccagaggcggaggacaaagcggaaggccgaagagcgaggacgaaaccggcggaaccgcactttggagcctaacgagccatcgctgcgtctgagactgggacccggaagtaaacaggccggacgtgacgcaagccgctcggcctagggatggtggctggccgggttgtcatggaaaccgctcaggagcagggagctgggagctatgagtgctgactgcgtgaactcggcctccacttcccggacctgccacttatcatgatccacgagctgtactcatgactccgcacaagcaagcaggggctgacggtcggatccctcgcccccattttacggacagaagtaccgaggctcaaagagagccagtgagatgctgaaatcacgcgtgattggaatccagccttgctagggctgcgggtgttacgggccgtgggcggcggttaagagcgtgggttctatttttagttttgccacttactagctgtgtgaccttggacaagttacctaacctctctgagcctcagctttctaacctgtaatattaaataataaagccaggcgtggtggcacgcgactgtagtcccagctagtcgggaggctgaggcgagaggatggcttgctcccaggtgttcgagaccaacctgggcaacataacgaggccacgtctcttaaaaaaaaaaaaaaaaaaaaaaaaaaaaaaaagccgggcacggcggctcacgcctgtaatcccagcactttcggataaactatatatatatataatctgacatccccaccagaccctgagcttcttattcatctatttccccccgagctctgcacatgtctgatgaggaggcacacaacagatgttcattgattgtaggattctcactctgagtcttggtgaccccagctaaaaccggtggggcttgtgtgatgagtcagtgacacaatactgggaaacgtttggagaaccagcaatctgctgctgtccaaacagtagcattactgtgtttacctgtcgttgcctgagcaccgctcaaagtccctgtgttctttatcagctcatgtttaagctcctctcttaattatctgcaatgtgatgatgttcacaggaattccatctgagacaaactgtcccaccttaagtctgcctcttacagcaactcagcactctggtttggtagctcttacaatattgcattttcacgtggggctgcttaaaaaagtcccctccagctctgtgggtctatgacaggcaaaagagaaacaaagattttgaagaagggctttaccagtaggaaaccctggtcatcatctactatcagaaaagacccaaagtctccaaagacagtcacatttctcagttttttttttttttttttttttttttgagacggagtctcgctctgtcacccaggctggagtgcagtggcacaatctcagctcactgcaagctccgcctcctgggttcacgccattttcctgcctcagcctccggagtagctgggactaccggcacgcgccaacacgcctggctaattttttgtatttttagtagagatggggtttcaccaaggtggtcaggatggtctccatctcttgacctcgtgatccgcccacctcggcctcccaaagtgctgggattacaggcctgagccactgtgtccggccatgtttctcatcttttaaacacagttgaaggcttgtgatttctctacttggtgatgtagaaatgacaggagcgtcctttcccgactttattatataatgattaccagattatgtaagggtcacgtgacaatgattaggcacttctacttccgaagagccaacaacacgaacaatctacctacctctttctattttttagtttttttttccatcaccaaagtaatacatgattccaacaatacagaggagtatagaacaaaaagcaaaacagaaaagctaccccatgacccagcaattggatttctcaaaatctgctagagaaacatacactgtgcccaaagagacctcttgcatcattgtttctaatgcaaaagcaataataggaaatatttaaatctccatcactggggtaatggtatatccatactaacaaatactgtggatcacttaaaaagggtgatgcatggccaggcgcggtggctcacgcctgtaatcccagcactttgggaggccgaggtgggcaaatcacgaggtcaagaggccgagaccatcctggctaacacagtgaaaccctgtctctactaaaaatacaaaaattagccgggtgtggtagcaggcgcagtagcgggtgcctgtagtcccagctactcgggaggctgaggcaggagaatggcatgaacctgggaggcagaggttgcagtgaaccgagatggcaccactgcactccagcctgggctacagagtgagactctgtctcaaaaaaacaaaacaaaaaaagtcaactggggacaggaacacagatacagatatctgtctttcattccacaaacacacatttatgtgatctgtattaatatctttctcccccagaagtcagtgaactccatgaggacaaaactatgtctgttttgttcacaattatattactactacctgacatatatgcactacctagcatgcaataggttgttcaacataatttgtttctgaccagaattttcactgaatacctaccatgtgccaagtttgatgtcagattttttttttttaattgagacagggtctctcactctgtcaccctgtctggagtgtagtggcatgatcatagctcactgcagcctcaacctcctaggctcaagcgatcctcccaccttagcctcctgagtggcggggaccacagttgcacaccaccacatctggctaattttgttaactgttttgtagagggagggtctcgcaattttgccaaggctgctctcaaactcctgggctcaagtgatcctcccaccttggcttcccaaggtgctgggattacaggcatgagtcaccatgcccaccctgatgttaggtttaaagggcataactgtgagtgagacagacacagttcctgccctcacagagcatccagtctccttaaccgaaagagaatattcataacataggagtaggattaataaaaccctagaattcaggatagaagatggtaaatgatatgagaggggtatagagcttagagcatggagaagtgacctctgacagggtaaatgaaggatagcctccaggaggaagtagcatttgagctgggctttgagtgacctggacatgtgaggctgtccagctttccttccagctggagtaaagggagcaatcaaaggcaaggacctgagatcaaaaactcggctacctgtggctgggctcagtggcacaagcctgtaatcccagcaatttgggaggccgaggcaggcggatctcctgaggcccagagtttgagaccagcctgaccgatacagtgaaaccccatctgtactaaaaccacaaaaattagccagcctgtagtagtgcccacctgtggtcccagctactcaggaggctgaggctggagaatcgcttaaatctgggaggtggaggtggcagtgagccaagatcacgctactgcactctagcctgggacacagagggagaccctgtctcaaaaaagcaaaaacaaaaacaaaaaacaaaaacacaaactcagctacctgcaagcacataatgtgggcaaatacgaggtactagagtactatagcctcacactgcgtaggaccagaaatgagtaatgtaatctaacatggtacccggctcacagtaggcatccaataagtacttcagtgagaaaacaaatattgttgaattccttccatgcttcagctgacttgtggccaagatccccactcaccaggaatgaccagatactctgatttttggagaggagttagagatccagattgtttgtttatttatttatttaaagataaggtcttgatctgtcatccagactggagtacagtggcatgatcatggctcactgcaacctcaaacttctggactcaagggatcctcccaccccagcctcccacacagctgggactacaggctcatgccatcatgcccagttaattattttctgaagacgtgggatcttgctgtgttgcccagggtggtctcaaactcctagcctcaggtgatcctcccactttgacccaccaaagtgctgggattacaggcaccagccactgcgtccagcctggaatccagatttttaaataaaatttcttaattataaacaatatttgtaaatatacctcctgtttctacctgttgagagggcctagaagaaatggcacacctgtagcaacaagcacgtagactaagactaaccagatcttagtccatggaaccagggcttcctggagaaatggctgattcccaggggtaggtcagggaaattacaacatgaggttggaacatgttattgagccagaaagtaggaagtgcccaaagaatgatgggacatgttgaaagcacacaaaagccaggatggagggtccctattggccagatatgggcaatgtgagtatcaaaataaataataataacagattataaaacttaattgtggggagagaagttatgagcccatactaatgctaaacataaaatatcatgcttcatccaggcatggtggctcatgcctgtaatcccagcactttgggaggccgaggcaggtagatcatctgaggtcaggagcctggtcaacatggtgaaaccccatctctagaaaaatacaaaacaaaattagctgggcatgatggtgggtgcttgtaatcccagctacttgggaggctgaggcaggagaattacttgaacccagaaggtggaggttgcagggagctgagattgcaccattgcactccagcctgggtgacagagcgagactctgtctcaaaaaaaacaacaacaaccatgttttattttttattttttaggctagtcaagtgaagcaatgggaatggagaagaaacaaatctataactggttgtgatgaattagtcgtaagcaccactgcaattggaccagtcaataccatggttatcacaggagtgtggctgaggctgtgtttggccctgggtgccaggtctgcaccctgcactaaggatgggtgaggaacgacaggcagtcgagctggttggtgctacaggtaacgatagtacctaccaaaatacaggttaaatgagatagtccttgtgacatgataacatgttaattactcaattagcattagctatcatgaatcaatccttttatatgttttaaagcctagagaagcactttatccatagtggctgcttattacatttattacatttctcttgattgaatgaaatgatacagttttgctaactactagctcttacttcccatactgttttcttttcaggatcctcactctgatctaagagcataatttaattgtgttgtcagacagcttatcttcagggttatgacatggagtcagactgcctgggacatcatatttatttatttatttatttatttatttatttatttatttattgagacagggtctctgtcacccaggctagagtgcagtggtgccatcttggctcactgcaacctccacctcccaggcttaagcaatcctcctacctcagcctcccaagtaactgggactacaggcatgcgccaccatgcccttgtattttttgtggagacaggatttattcatgttgcccaggctggtctcaaactcctgagttcgccctctccctctccctccccctccccctccccctccccctccccctctccctctccccacggtctccctctctctctctttccacggtctccctctgatgccgagccgaagctggacggtactgctgccatctcggctcactgcaacctccctgcctgattctcctgcctcagcccgccgagtgcctgcgattgcaggcgcgcgccgccacgcctgactggttttcgtatttttttggtggagacggggtttcgctgtgttggccgggctggtctccagctcctaaccgcgagtgatccgccagcctcggcctcccgaggtgcagggattgcagacggagtctcgttcactcagtgctcaatggtgcccaggctggagtgcagtggcgtgatctcggctcgctacaacctccacctcccagcagcctgccttggcctcccaaagtgccgagattgcagcctctgcccggccgccaccccgtctgggaagtgaggagcatctccgcctggccgcccatcgtctgggatgtgaggagcccctctgcctggctgcccagtctggaaagtgaggagcgtctctgcccggccgccatcccatctaggaagtgaggagcgcctcttcccagccgccatcacatctgggaagtgaggagcgtctctgcccggccgcccatcgtctgagatgtggggagcacctctgccctgccgccccgtccgggatgtgaggagcgtctctgcccggccgccccgtctgagaagtgaggagaccctctgcctggcaaccgccccgtctgagaagtgaagagcccctccgcccggcagccgccccgtctgagaagtgaggagcccctccgcccagcagccaccccgtctgggaagtgaggagcatctccgcccggcagccacctcgtccgggagggaggtgggggggtcagccccccgcccggccagccgcccggtccgggaggtgaggggcgcctctgcccggccgcccctactgggaagtgaggagcccctctgcccggccagccgccccgtccgggagggatgtgggggggtcagccccccgcccggccagccgccctgtccgggagggaggtggggggggtcagccccccgcctggccagctgccccgtccgggaggtgaggggcgcctctgcccggccgcccctactgggaagtgaggagcccctctgcccggccaccaccccgtctgggaggtgtacccaacagctcattgagaacgggccatgatgacaatggcggttttgtggaatagaaaggggggaaaggtggggaaaagattgagaaattggatggttgctgtgtctgtgtagaaagaggtagacatgggagacttttcattttgttctgtactaagaaaaattcttctgccttgggatcctgttgatctgtgaccttacccccaaccctgtgctctctgaaacatgtgctgtatccactcagggttgaatggattaagagcggtgcaagatgtgctttgttaaacagatgcttgaaggcagcatgctccttaagagtcatcaccactccctaatctcaagtacccagggacacaaacactgcgcaaggccgcagggtcctctgcctaggaaaaccagagacctttgttcacttgtttatctgctgaccttccctccactattgtcctgtgaccctgccaaatccccctctgcgagaaacacccaagaatgatcaataaaaacaaacaaacaaacaaacaaacaaacaaactcctgagttcaagcaatccacccgccttggcctcccaaagtgctgggattacaggcgtgagccactgcgcccagcctcatcatctttctaagcctcagtttccccacctgtaaaatggagctgatcatagtatcttcttcataaggttattttgcatattgaatgggataacatgtgcaaagaagttcccccagtgcctggaaggcagtgatcctgcagcaaatgttatccacgattaggattcttgttgtcccacatgaatttgctgggtgctacagattctgtctggctcccaaagctcagaattcattctggcctcccacgggtggaggcagggtttgggggaggtttgtaactctaaagatggcacgtcttgaactgaaagctggcgctgtcaagcttcttcacaatcagtaagaacggctttcttcccccttttccctaaatataaacccaactgccaatcgctttaaagtcttcatgtctgcagcaggagcaacccacgagtccaaaggtgaggcagctggcagagggctgttgttagtgggatccacccagcccagcccagctccaaggagacacacttcatgggactggatgtgggcaactcagcatttcttccttatgattcttaattgctcctgaaaacagtaaccccaaagttacgagccccagtgtgtactataacagtctcttaaagtactgggtttcagggctgggcacagtggctcacttgtgtaatcccagcactttgggaggccaaggcaggaggatcacttgaggtcaggagttccagaccagcctggccaacatagtgaaacaccatctctagtaaaaatactaaaattagccgggcatggtggcgcatgcctgtaatcccagctacttgggaggctgaggcaggagaattgcttgaaccaggaggcggaggttgtagtgagccgagattgcaccactgcactccagcctgggcaacagagcgagactccatcgcaaaaaaaaaaaaaaaaaaaaaaaagtattgggttttagaagacggcttgctggaagcaaacatctttgtccttccctctcccttgaagcaagcaaaggaaagccacacacaggttgtccttattacatagcaacattatccctaggccagaagtcgaagtaggctctggagccgaaaggcttaagttcagatcctagccctgccgctttccatctgtgtgaccttggacaagctatctaacctctctgggactgcctctatttccttatcagtaaaatgggattaatagtacccctgaggattattgagagattaaatgagctaataatatacgatgccaagtgcagagtgagcattcaacacaagctagatatgactgactcagtcacagggcttgccaggctggggtgtagagtcagcctcagaccaatggggaacataatgggacttatgccattatggtcaggccttgacaccttgcatttatgctgctcaaaagaggaggattttggctaggggccatggctcacgcatgtaatcccaatgctttgagagggcgaaactggaggattgcttgaggccagaagttggagaccagtctaggctacatagtaaagccccatctctccaaaaaattttaaaaattaggtagacacgtagcatgagcccatagtcctagctactggggaggctgaggtgggagaatctcttgagcccaagagtttgaggttacagtgaactgtgatggcaccactgcactccagcctcagcaacagagtgagaccctgtctctaaaaaaaaaaataagttaaaaaaagtgtagaattgtataatatccagaatatatgaagaatttctataacgcaacaacaaatagacaacccaatttaaaaatgggcaaaggtggctgggcatggtggctcacacctgtaatcccagcactttcggaagccaaggggggtagatcatttgagctcaagagttcaagaccagcctggccatcatggcaaaatcccatctctactaaaaatgcaaaagttggccgggcacagtggctcacacctgtaatcccagcactttgggaggccgaggcgggaggatcacctgaggtcgggagttcaagaccagcctggccaacatggtgaaactccatctctactaaaaatacaccaggagcagtggatcatgcctgtaatcccagcactttgggaagccaaggtgtgtggatcacctgagtttgggagttcgagaccagtctggccaacatagtgaaaccccatctctactaaaaatacaaaaattagccaggcatggtggcatgtgcctgtaatcccagctacttgggaggctgaggcaggagaatcgcttgaacccaggaggcggaggctgcagtgagtcgagattttgccattgcactccagcctgggtgacaacagtgaaactctgtctcaaaaaaaaataataaaaaaatttttttaaaaatacaaaaattagctgggtgtagtggcaggcccctgtaatcccagctacttgggaggctgaggtgagagaatcatgtgaacctaggaggtggaggttgcagtgagccaagatctcaccattgcactccagtctgggcaacagagtgagattctatctcaaaataaataaataaataaaattaaaaatgggcaaaggacttgaatagacatttctccaaagaagatacacagatggccaataagcatgtgaaaagatgtgtgtcatcactaatctttagggaaatgtaaatcaaaaccacagtgagattccacttcaaaccctctagggtggctataataaaatgtttttgaaaaggaaaataacaaatgttggcaatgatgtaaagaatggaatactcgtacttgctggtgggaatgtaaaatggtgcagccactgtaaagaacagtctggcagttcctcaaaaagttaaatacagaatgaccatatgactcagcaattctgctcctaggcatatgcctgaaagaattgaaaataaggactcaaaacagacacttgtacatcaatgttcattgcagtattattcacattagccaaaaggtagaaacgacccaagtgtttgctgacagatgaatgaataaacaaaatgtggtacatccatgcaatggaatattattcagccttaaaaagtgaggaaattccaatgctacatcatggataaaccttaaaaatattatgttaagtgaaagaagccagtcacaaaaggacaaatattgtgtgattccactagatgagatgtctgtaataggcaaattcatagagacagaaaaaggattagaggttaccagtggctggagagggaggaatggggagctatttcttatagatggagtttctgtttaggttgctgaaaaaattttggaaacagaggcgatgtttgcacaacattgtgaatgtaattactgccactaaagtatatgctttatggtggttaaaatggcaatttttatgttatgtatgttatcacaataaaaaaattttggggggggccaggccagtggctcacacctgtaatcccagcactttgggaggctgaggtgggtggatcacttgaggtcaggagttcgagaccagcctggccaacatggtgaaaccctgtctctactaaaaatacaaaaaaaaaaatagctggatctcatgacacccacctgaaatctcaggtactcgggaggctgaggcaggagaattgcttgaacccaggaggtggaggttgcagtgagccacgatcacaccattggaatccgtgcactccagactgggcaacagagcaagaccctgtctcaaaaaaaaaaaatggtgtggctgggcacagtggctcatgcctgtaattccagcactttgggaagccaatctgggtggatcatttgatgtaaggagttcgagaccagcctggccaacatggtgaaaccctgtctctactaaaaatacaaaaaaattagctggacgtggtggcacacacttgaaatcccagctactagggaggctgagggagaagaattacttgaaccgggaggcaaaggttgcagtgagccgagatggtaccactgcactccagcctgggaacaaagtgagactccatctcaaaaaaaaaaataaataaataaataacagaagatctggacagacacttcacagaggtaaaacatacaaaatggccaataaacaaatgaaaaggtactcaacgtcattaatcattatgaaatctaaaattgcacagtaccactacacactcactagaatggctaaaagtgtctgacaaccaaatgttggtgaggacgtgaagcaactcataccttgttagtggtcatgggaaatagttggaaaatggcttggtttggcagtttctaataaaattaaacacacattggccgggcacggtggctcacgcctgtaatcccagcactttggaaggccaaggcgggcagatcacctgagatcaggagttcaagaccagcctggccaacatggtgaaaccccatctctacaaaaatacaaaaattagccgggcatgatggcaggtgtttgtaatcccagctactcaggaggctggggtggaagaatcgcttgaacccaggaggcggaagttgcagtgagccgagatcgtgccattgcattccagcctgggcaacagcaagactccatctcaaaaacaaacaaacaaaacagacaaacaaacaaacaaaacaaaaaaaattaaacacacatttacgaaatgacccggaaattctacttctatgtgaatgcttagttttgaaatgtcttgttaattgtgatgactttcttctatccttagccaatgtctcaagtcacaatatacacatgaggtgcagtttattgtagatgaaggtggattcaaatcccctatttcaatgtcttcttgttagtactcattatttggttgtagttcttgtcagatattatgagatcgttatgtttttacctcattatgtggctgacccttgatataatagaaactgtaaaatgctatgagctggtgggataactgatgaaatgcaattttctggaggcagtttttttttaatttttttttttgagacaggctctcactctgtcgcccaggctggagtgcagtggcgcagtcttggctcactgcaacctctgcctcctgggttcaagcgattctcctgccttagcctccttagtagctgggattaacaggcatgcgccaccacacccggctaatttttgtatttttttggtagagactggggttttaccatgttggccaggctggtctcaaactcctgacctcaagtgatacaccggcctctgcctcccaaagtgttgggattacaggcgtgagccgctgcaccctgccaggggccgcatttttatgtgatcatccccgcgtggctttcctgtttgagactgaataattcactgttacatttccaacacttaccaggatacttagcacatagagttattggttgaatgaatatttacatgccagtgtctcctctgttaagactccttttaggctgagactctttttttttttttttaatttttgttttcaggcaatgtacagtaagccatgatgggcagaggcaggaaatacttagagaactggaaagaataaaggagccggtgttctcttcgcagggcccggtgagtctgtgagatgctcacacgccccctggtggtgtcagtaggaattcttcctggcgctcagcaatttggcaatcttgaagaaccggctgaaatcaagatgaaattatctgcccacaggtttaaaaatgtagcaatacatgatggggtaaattatgcctaacttagacaagtatagcgataaattttacatgtggcctgaggctgatagaactgtgacgcctgagagttacaggatttgagggctggagttacttccgattcatcttaactgttcttaatgcatcattgtttattttttctttttttaagagaaaaaaaagtcacccaggctggagtgcaatagcacgatcatggttcattgcagcctcaacgtcctggggtcaagcagtcctcctcagcctccccaagtgctgagcccacatgtgcatgcccctatgcccagatattttttgtattttttgtagggatgggatcttgctatgttgcccagggtggtctcgaactcctgggctccaggcaattgccttagcctctcaaagtgctgggattacagatgtgagccacctcacctggtcccgaatttttaattaaaaagtggtgcatgaacttgatataaatatttagacaacacaagaggaaacagaaggagaagtctttctccaggcccagaacctaagacccagtcccttagctccccttttgttttttggttttttgtttgtttgtttcttttcatataaaatagagacagggtcttgccatgtttcccaggctggtctcaaaccgccaggctcaagtgatccacctgccttagcctcccaaagtgctgggattacaggcatgacccaccacacccgggccattttccctttctaataggaaccattggtaccagattctcagaaatcttcccaggaggccgggcgcggtggctcacgcctgtaatcccagaactttgggaggccgaggcgggtggatcacctgaggtcaggagttcgagaccagcctggccaacatggcgaaatcccgtctctactaaaaatataaaaaaattagccgggcgtggtagtggacacctgtaatcccagctactcaggaagctgaggcaggagaattgcttgaacccaggagatggaggttgcagtgagccaacatggtcccactgcactccagcctgggtgagagtgagactccgtctcagaaaaaaaaaaaaaaaaatctttccagtagggcaattgactcatcctgttttgcccgggactttcccagttttggcactgaaagtctcacatcctgggaaacccctcactcccaggcaaacctggacacttggtcaccctactttccaaaggcatctatttatcatatacaaacatatacatatattagttgcattacttggcatcttgatgttgttttaattaaaaatattttttgggccaggtgcagtggctcacacctgtaatcccagcactttgggaggccaaggtgggcagctcacttgaggtcaggagttcaagaccagcctggccaacatggtgaaaccccgtctctactaaaaatacaaaagttagccaggtgcagtggcgcatgcctgtaattccagctactcgagaggctgaggtaggagaatctcttgaacccaggaggcagaggttgcagcgagctgagatcgtgccactgcactccagtctgggtgacagagcgagactccattttaaaaaaaagttttatatatatatatatatatgagatgattcaatatcagcttcatatttatttaacaaatatttatgtaattacctagcatgcaccaggcattattttggaagctgaagataacagcagtaaacaaaattgacaaaacctcctgacctcatggaattgatatactagtaattatatctattgcatttgtttaatcacccccaatcatcattttggttgcttccagtatcttcctagtgtgacaacgctgtcctggatatccgtgtgcatgtagctgtctcacatgcatgagggtatctatagcagcgctgtccaatagatcttcctgcaacgatggaaatgttctgtgtctgatcttttcaatatgtagccacgagtcacttgtggctattgagcactagacatatggctagtaagactggggaatagaattttatattttatttagttgttttgttttgttttgagacaaagtcttgctctgtcgcgcaggctggagtgcagtggtgcagtctcagctcactgcaagctccgcctcctggcttcacgccattctcctgcctcagcctcccgagtagctgggtctacaggcacccgccaccaggcccggctaatttttttgtattttttagtagagacagggtttcactgtgttagccaggatagtctcgatctcctgccctcatgatccatccacctcggccttccaaagtgctggggttacaggtgtgagccactgcgcctggccttttttttttttttttttttttttgagaaagggtctctgtcagtcaggctggaatgcagtggcacaatcatgtttcactgcagcctcgatctctagagcttaagcaatcctcccacttcagcctcctgagtagctgggaccacaagtgtgcaccaccacacgtagctagttttttttatgtagagatggcggggtcttgctatgttgattaagctggtttcaaactcctggcctcaagcgatcctcccatgttgacctcccaaagtgctgggattacaggtgtgagccactgcacctggcattaattttgtttttttttttttttttgagacagggtcttgctcttgcccagactggagtgcagtggcaagattacagctcaatgatgctttgaactcctgggctcaagcaaccctcctctgagtagctaagactacaggcacatgccactgcactcagctaattttatgtttgtttgtttgtagacagcagggtcttggtacgttgcccaggttgatcttgaactcctggcctcaagtgatcctcccacttatttttgtattttttgtagagatgggggagggagttgggggtggtggggtgtctcactgtgttacccaggatggtcttaaacccctggacaaaagtgatccacccccctcagcaacccaaagtgctgggattacaggcgtgagccaccatgcccagccctttcttaaatttaagcaaacaaattttaataatgatggctgactcctgtaatcccagcactttgggagaccaagacaggaggaccatttgagctcaagagttcgagaccagccttggcaacatggtgaaaccctgtctctacaaaaaatttaaaaattagctgggtgtggtgtgcacgcctatagtcccagctacttgggaggctggggtgggaggacggcttttgcccatgaggtggaggttgcagtgagccaagattttgccattgtcctccagcttgggcaacagagccagaccctgtctcaaaaaagaaaaaaaaaagcctaggcaacatagtgagaccccatcactacaaaaaatagaaaaaatagctaggtgtgatggcacatgcctgtagtctcacctactcaggaggctgaggcaggaggatcacttgagcctgggaagtcaaggctgcagtgagctgtgatcacatcactgcactccatcctgggtgacagagtgagactctgtctcaaaaaaaaaaaaaaaaaaaaaaaggaaagaaagaaagggagggaaggagggaaggaacaaaggaaggaacgaaggaaggaaggaagggaaggagggaggaaggaaggaaggaaggaaaaaaggaaggaaaaatttaggctgggcacaatggctcacgcctgtaatccctagcactttggaggccgaggtgggccgatcgtgaggtcaggagatcgagaccatcctggctaacatggtgaaaccccgtctctactaaaaatacaaaaaaaattagccgggcgtggtggtgggcgcctgtagtcccagctactcaggaggttgaggcaggagaatggcgtgaacccaggaggcggagcttgcagtgagccgagattgtgctactgcactccagcctgggcaacagagcgagactctgtctcaaaaaaaaaaaaaattaatttaaaagaaattttttttgagactgagtttcactcttgttgcccaggctggagtccagtggctcgttctccactcactgcaacctctgcctcctaggttcaagcgattctcctgcctcagcctcccaagtagctgggactacaggcatgcaccaccaggcccggttaatttttgtatttttagtagaaacagggtttcaccatgttggtcaggctggtcttgaactcctaacctcaggtgatccacccgcctcagcctcctcctgctgagattacaggcatgagccgccatacccagctttttttttttttttttttaaagaacatgattcaactgtattgctctctataagaaactcactttatagactggttctgaaaggatggaaaaagatatttcatgcaaatatctttttgcgtgaccaaagaagaggagggctggcaatactaatatcagaaaaattacttgtccaggccgggcacggtagctcacacctgtaatcctagcactttgggaggccgaggcgggtgcatcacctgaggtcaggagtttgagaccagcctaaaaaatatggtgaaatcctgtctctactaaaaatacaaaaattagccaggcgtggtcgtgcatgcctgtagtctcagctactcaggaggctgaaacaggagaatcacctgaacccaggagacagaggttgccgtgagctgagatcacaccactgcactccagcctggacgacagagcaagaccctgtctcaaaaaaagaaaaaagaaaaattacttgtccaaaaggttacaagagataaagaaggcattgtatgttaataaaaagttcaatacagcaagaagatataacaattataaacatttatatacctaataacagaccatcagaacatatgaagcaaaaattggtagaattgaaggaagaaatagacaattccacaataatagttagagacttcaatgccccactcccaagaataaatagaacaaacaggagacaagtaaggaaataaaggacttgagcgacacagtaagacaaccaggtctaacacatgtacagacactccccagcaacaacagcatccacattcttctcaggcacacatgggatatcctccaggatggaccatatgttaggccacagattaagcctcaagagattttaaaaggtagacatcagccagctgtggtggcttaggcctgtaatcccagcactttgggaggctgaggcaggaggattgctcgtgcccaggagtttgcaaccagcctgggcaacacagccagacttcatctctacaaaaagagacagaagaaaaggagaaagagagaaagataagaaggaaagaaagaagaaataaaagagatcataccaaatatcttctccaagcacaattggataaggctagaaatcaatatgggggggttaaaaaaaaaaagaaatcaatatcaaaggaaaactggaaaattcacaaatttgtggaaatttacacactcttaaaagaaccaatggatcaaagaagaaatcacaagggaaattagaaaatactcagaaacaggccaggctgggtggctcacacctgtaatcccagcattttgggaggccgaggttggcggatcacttgaggtcaggcgtttgagaccagcctggccaacattgtgaaaccctgtctctactaaaaatacaaaaattagccaggcgtggtggcaggcacctgtaatcccagctacttgggaggctgaggcaagggaattgcttgaatccaggagagggaggctgcagcgagcagagattgcaccaatgcactccagcctgggcgacagagtgagactccatctcaaaataaataaattaattaaataaatagagaaaatattgagaaacaaatgaaaacaaaaacacagcatgccaaaatttactggacacagtgaaagcagtgctcaggggaaattttatagctataagtgcttcaaaatcatagacagaaaattgccagggcctgggggtatggggatgggaggagggaagaggaagttattgtttaatggggacagaatttcagtttcagtttagcaagaagaccagaattttagagatagctgatggtgatgattgcacaatatgaaatgaatgtactttgttgttggggtttttttgttttgttttgttgttgttgttgttgttttttgagagggagtctcgcgctgtcgcccagactggagtgcagtggcaagatcttggctcactgcaagctccgcctcccaggttcaagccattctcctgcctcagcctcccgagtagctgggactacaggcgcccgccaccacgcccggctaattttttgtatttttagtagagacagggtttcaccgtgttagccaggttgtgtttttgtttttttttttttttttcagacggagtttcgttcttgttgcccaggctggagtttagtgactgttggagtgagtgagccatcttggcccacggcaaccttcgcctcccaggtcaaaggcttttcctgcctcagcgtcctgagtagctgaggctacaggcatgggcaaccacgcctggctaattttagtattgttagtagagacggggtttcaccatgttggccaggctgctctagtactcctaggctcaagcgatccgcccacctcggcctcccaaagtgctgagattacagaagtaagccaccttgcccagctcctttgtataaataaatgatattgattttcttcttgcagctcaggaattagatctgttattagaatttgcttaaatttaagaaatggctgggtactgtggctcaccgctgtaatcccagcacttcgggttgccgaggcaggcggattgcttgcgtccaagagttcgaggccagcctcggcaacacagtgagacccgcccgctctctgcaccactccttccccccctcctttccccgtctctacaaaaaatacaaaaataaataaattagtccggcatggtggtgactgcctgtggtccagctacgcaggaggctgaggtgggaggatcgcttgaaccccggtggtcgaggctgcagggagccatgatcgcgcgcgccactgaacaccagcctgggcgacaaagcaagaccttgtcccaaaatagattaaataaataaataaataaatttaaggaaaaagcaacttgattcgaagataaatagtgatagtgcaagtggtgccgaactaacgataaatttggaaaacagcggcccacgcgcagagcccgtcccaattctggcagcctttggatttggcttccacgttttccagatttccctcggcctctagctcgcttgcgtcagaggggccccgaggggcggcccacccgctagccccgcccccaaccgctcaccgccccgcgagccccgccccctcggcctcctcctcatcggccgccgttgcgcggcgcagagcggcagcaagatggcggcgcaacagcgggactgcgggggtgctgcgcagctggcggggccggcggcggaggctgaccccctaggacgcttcacgtgtcccgtgtgcttagaggtgtacgagaagccggtacaggtgccctgcggacacgtgtaagcggcgagcccgggcctggtcggggggcgcttaactgggaagggaatggagccgaggagcgagatgggtctcagggcgggagccagaggacccacccagaggggcctcccgggggtgtcccccggggctcctaagggccgtgaaagctgccggggcgctcttctgtcccgccccgctcactcctaagtatcccgttcctccgcccgtcttagcggggcagctgctgtctgttgagcgcctgcgatgttccaggcggcctgtcagtctccttcccacacgtgatagtggactcgtgccctgcggggactttaggctccgaagtccgcccttggagagccgacgtttcctttctagtccacgtcgctcttaaagcataggacatttggcgtcgtgtctagctgtggcgagttattctactgtgcactaaagtcgggagaaacgctgaactagactaaaacaacaaaagggaagtctttatggggatctggccagtttgcccttagctgtgaaaggggggtgggagttggcagatgggattgttagcattctacttcctgtgtaggaggtttgtttctttcagttttcaattaagccttcatgacctgaatattgtgaatagagtggttataatgattaaagcagatatgtgtataaatgtccagtccaggtcctgggctgtggccggggctttcgaggttggtcaggttggtcgatttgaatctaagccttgttccatcagacgcacaaacacatctgagttgaaagaattgtagacaacgtggccacctgcttcttgcctcagaattggcttttcctctggcccctctcagtgcttatcgtgggatcaccttggcattggtcttggcagcgggcacagtagccattgcactccatgggcattattctatagccaccctgcagcgggggagggttggcagccattttacaggtgaatacactgagggtccgaggctctcttagggaagggtcaccgtggcctagctcttcccagatgtactgcaggtgaccatttcagtagtccagagaacagtgcttggcacctagctggctgctttttgcttcatcatgttgctttaggctattcatctttgcaattcggttagcctggaactcttccccccacccctcccttttcaggcttcaagtcccaggttaagttacctcaccaaataccatccccatctaaattacttcccccacttcctttctgggacttaacttccttctccttgcttgcacagagcaaaacttaacagctcatgacggagtggccatatctttattgcccctgaactgactggaatggcctctgtgtgccagattttggggtagactctgccttcagagtttacagtccagtgaattgattataaataagtaccaatgactggtcaaactattgtaaaaattcattctgcaagtgggagggtatttcagggatcacacctctgtgcgtggggtgagtgatcaggtaatggttgaatgaactaataagtcgtgtaagcaagcttcacgagagttgaagtggtctttagctttttcattgaatccacttatccttggatcagatttacctgattttggattaattcagtggatttcatttactattaacatttgtaaaaaggctagacccagcacagtttgctaaatgaagagcagcaaaatttgagattttcttgagcttggtgaacctttcctaggtcagagggcaaggaacagtactggttttcaaaccttggctcttctctatcctcgctgtcctagccccacgtgatcagcagttcagtgcaaattgaagacagatggaagcacctctgtgagggcagcccaaatccccgctagctccaaccgactgctttctcctgtgcctagttgatttttaccttttgtgcttggaaagttgagcatcactgcaactctggctggggcattggatttttataaaactttatttcaagccctgaatgactgtgttctccaatctggtagaatacagctggagaaaggcagctggctgggtgcccaagagaagggaatttcttcctagcactgtgacggagtggagcatcggaaggctgaactagaaaagggcgcataagtaggaaatagaaactgaaaagccatcccaggatatttgagttgttcaaaagcaggctggtagtttgggcatgtctcaggcacaaagtgactcgtgaacatttgatagatgagctgtacctgtgtgtgtgcttgagaagagacttcgagctgcttttatctgcatgctgggtttggttccattatactcactggaccctctgtgctctcttgggttcctcttgtcatctgcctttgtgaacaggcaacacaagtgatggccacaggccctgcctgtctctactgcctcatcacttgcccttctcaccatggtctaccgcatcatggcccccaaggtctgcctgccttcctttccagtcctcatttgtgtgtggcgtgatcttggtgtggagctctgcacccagatctgtgtggctgtcctcgtaatcaggtcccacccagctcaaatgccaactcctcagaagcagctttctatgatcaccccagctggtctgtttgccatatttccttcatatttttaatcactatctgaaattaacatttgtgtttcccttcactctagaatgtaagcatcatgagaacagggctttgtcaagtttccattgccctcagtggtgaatgaatagactccctcaccttctctgtacctggtctggaattttgcctaacagcattaacatctaacttaatgacaaggaggaaggagattcttagaggcagtagaaaatggtcaagtgttcagaagatggcctttcattatatatctttagttctttctggcagatttggttatactgtcttaatctatcaggttgggtaagtagcccagggtgtcttctccattctttctgtatgccttatctcagcattaccatcttcctaggcttcaggataggaactcggtcatctttgacttcttttcttcaaagtcagtaagttatcaagtcctcctgattctacctttctgtgaatggtttcctgaattcatcccctgctgcttcagtcagaccctcacaatcctctgcctttagccatctgtttggtttctactttgtctcttctcaccttctcacctaaaaaaaaaaaaaactatagggctgggctcagtggctcacacctgtaatcccagcactttgggaggccaagacgggtggatcaccagaggtcaggagttcgagaccagcctggctaacgtggtgaaaccccgtctctactaaaaatataaaattagctgggtgtggtcatgcgcgcctgtaaccccagccacttgggagtctgaagcaggagaatcgcttggaccggggaggcagattttgcagtgagccgagattgcaccattgcacttcagcctgggcaacagagcacgactctgtctcaaaaaaaaaaaaaaaaaaaaaagtaacaaaactttgttttccatgatagcacagagatatttttctgaaacctggatttggccttgttttgttaataccttccttttaaactcctggctccctactgtttatgaggaaaagtctgttagatttttatttcctcagatacatatcaattttaagcctaaattaggcctagaatagtcttcccttcctctgctagctgacctctttttttaaaatgccagaggggtaatgggccaacatctgtaacaaggttcgagggtggcacatctcacacatgcacatgaacacccagtcctcaggttcatgaactacaaaaggatccatctgaacccttttttttttttttttgagacggagtctcgctctgtctcccaggctggatggagtgcagtggcgcgatcttggctcactgcaagctctgcgtcctgggttcatgccattctcctgcctaagcctcccgagtagctgggactacaggcacccgccaccactcccagctaatttttgtatttttagtagagacggggtttcactgtgttagccaggatggtctcgatctcctgaccttgtgatctgcccgcctcggcctcccaaagtgctgggattacaggcatgagccaccgcgcctggctgagctgaacccttttaaggctgatcagagatgccgtctctgcagtcttcccctccaccccccccttgagacagagtcgcactctgttgcccaggctggagtgtgcagccacctctgcctcccaggttcaagcaattctcctgcctcagcctcccgagtagctgggattacaggcatctgccaccatgcctggctaattttggtatttttagtagagacgggtttcaccatgttggtaaggctggtctcaaactcctgacctcgtgatctgcctgccttggcctcccaaagtgctgggattacgggcgtgagccaccgctcccagccttcactgcagtcttaccagccctttccttctcaggtcactagttgattttccctttatgttcctgtagcgctttgccttcacctgtaatgatagcagctcccgtttgtggtgcgttttgtaagggctggacactctgccaggggtctgctatacaaactgtatcctcccagcagtcctagaggtaggtactactctctccatttcacaaaggaaaaaatggagattcaagaaaccccactgagatccttcagtggcagggcctaaggcttgaagcctcaaccttaacaccttcactgtgtctatcacaggagtttgcatttgtttctgtagttgtgtgttctttgtagtccactcctatccctcattttttctggcttggaaggacttagtatttgaactgggaggagagagcaagttgttttttactccattatccattgatgtctttttaaaagttgatccatatttgtcgtcttgtctccatgatgcgtgacagaggttctctgtatgtcttgttctagcttttgctctgcatgcctgcaggaatgtctgaagccgaagaagcctgtctgtggggtgtgtcgcagcgctctggcacctggcgtccgagccgtggagctcgagcggcagatcgagagcacagagacttcttgccatggctgccgtaagaatgtatgtggaagtgatgtggaagagtccatgtctttccatgataagttggggtaaaacgtacagctgccatgttgttgctgaagttagagcatgactaggtcactaacagcacgcgtgcatgccaattacctgtggtgatggctgggctggtttgttttcataaccttactggtttttgtttctttttttaagagttggttaagtatatattttaggtttgaaagccatagaaatcagttatcccagttttttcctataaaagatcaattatggccaggcgcggtggctcattcctgtaaccccagctctttgggagtccgaggcaagagcttgaggctaggagttaagagaccagcctggacaacatagtgagacctcatctttacaaaaaaataaaattagccgggtgtggtggtatgtacctgtaggcccagctactcaggaggcagaggccagaggatcacttgagcccaggagtttgggattacagtgatctatgatcatgccactgcactccagcctggctgacagcaagaccctgtctcttaaaaaaaagtcaatatgaaatcattggattgtaataacaatagctaacatttgaaatgcatccatgctcttgtataatcagagtcaagtatatttattttcatacctgttataactgctactggaaaggagaaatactgttgtcttattttccaagagatatacacagccttgttgattttagaatcattaaaatttttaaaattgcagaccatacaaaagtacacaataatgtaggcttgttcctcattccagagattacttcaaaattcgttcaacttaaggcctggcaaggtggttcatgcctgtaatcccaacactttgggaggccaaggtgggtggattgcttgagtccaggagttctagaccagcctggacaacatggtgaaacctcggctctactgaaaatacaaaaaactagcagggcatggtggtgtgtgcccgtagtctcaactgttcgggaggctgaggtgagaggatggcttgagcccaggaggcagaggttgcagtgagctgagttcgtgccactgcactccatcctgggtgatagagccggaccctgtctcaaggaaaaaaaaagtgatttaatttcgaaagctgcataacattttctgccctttgacaaacactgtagaatttttaccaaccaagttgtaggatttttgcaaaatgagattatactataatatatatatttcttcaacttttttcacttttttaaatgtacactcattcccaactttttttttccacttttcaggttttttttctcttacatattggacagccttgcatgtcagtttcattatttttaacacttcggtatggatgcccatagtaagaatataccttaccatctccttttcagcgtgatttagtattagggatgcatagtagggccatttcaatgctgaatagggctattttctgtgtcttaattgggggcttcactcttgaggctgggcatggtggctcatgcctatatcctatcatttggagaggccaaggcaagaggatcactgaccccaggagttcgaaatcagcctgggcaacatagtgggactctgtatataccaaaacaaaccaacaaacaaaaccagctgtgtgtagtggtgtatgcatgtagtcccagctccttgggaggctgaggtgggaagattgcttgagcccagaagtttgagagcagcctggggaatatagtggacccagtttctacaaaaaaaggaaaaaaaaattgaggattcctcagtttgtagcttaaagtcaagttcttgagctggaggtgagacaatcatcatggtaagctggagctcaaatattggagcatttttttccccctttgaagtttacttttagaaactcaaaatattgaaatacaattccctactgtcttctttttttttttttttttttttttttgagacggagtctcactctgttgcccaggctggagtacagtggcgtgatctcagctcactgcaggctccgcctgttgggttcacgccattctcctgcctcagcctcctgagtagctgggactacaggtgcccatcaccacgcccagctatatatatatacacacacacacacacacacacacatacatacacacagagatatatatatatatatatatatatatttgtatttttagtagagacagggtttcactgtgttagccaggatggtctcgatctcctgacctcgtgacccgcccgcctcagcctcccaaaatgctgggattataggcatgagccattgcacccggtctcttcatctttatttatgcatgcataatgtggtttttggttttgttttgttttttttctgagacagggtctggctttgttgcccgggctggagtgcaattgcgtggtctcagctcactgaaacctctgcctcccaggctcaaaccatcctcccacctcagcctctcaagtagctgggactacaggcatgtgtcaccacgcctgcctaatttttttgtattttcagtagagacgagttttgcatgttgcccatgctgatctcgaactcgggagcgtgaagtgatggcccacctcagcctccctcaggattacaggtgtgagccaccgtactccgcccatgatgggctttttgtttgttttactgtatgcttttgcttttctccattttcaagattagtgattgtactgttggcatgcctcagaaaatgtttttctttcctttatcttccctcttttcttcaattcttaaaactttctttctttttagaaaacctgtaatgaagcactattctctgggttttcttctctttctgttttactgttgcacagcctagattttatatgaaaggctgggccgggcgtggtagctcacgcctgtaaacccagcactttggcaggctgaggcaggcagatcacttgaggtcaggagttcgagaccagcctggctaacgtggtgaaactccatctctactaaaaatatgaaaattagctgggcctgatggcacacacctgtaatcccagctactcaggaggctgaggtgggagaatcacttgaacccgggaggcggaggttgcagtgagccgagatggtgccactgcacttcagtctgggcgacagagtgagtgagactctgtctcaaaaaaaaaaaaaaagagaatttagattttaaagattatttctcagaggctggtgatagatactttaaccagggttagtggcttttatatgttttacctaaaggatcacttttctctgctgcacataacagaatgtggtttttggcttgctgtaaggagactagtttaaatgctagtatagaaaacttttaaaaacatcctagatttggagcttgtctgtgagcagacagcctatcatgaataggagcaaacctctaggagagttattttagagtggaagtggatatcctgatttagtcgaataaaatagcagccttggtattaatgggaaatctgcaataatcagggtttcagccccatcagcgtagtcaggagtttggtgagattatttgccagggtggtgtaggtctagttttctttgtgcccttgtttgggactatattttgcctgttgcaaggtcctcactaacttatgggctctgattcttcctatttgagttcttcctgtccaagatccggtcccacgtggctacttgttccaaataccagaattacatcatggaaggtgtgaaggccaccattaaggatgcatctcttcagccaaggtaaatgactcagtctccccttaggtggaggtcatctcttgctattaatacaaagaggttgcatgcccaggggtttagttgtatgaattgttatgctggctaaagctgatacaagtattttgggaggagtatgcaagggaggactctggtgttcacttcagatgttagctgagctatattctttttttcttttttgagacagagtctcgctctgttgcccaggctggtgtgcagtggtgcaatctcagctcactgcaacctctgcctcccgggttcaagcgattctcctgcctcaacctcccaagtagctgggattacaggcacctgccaccatgcctggctaaattttgtattttttagtagagacagggtttgtcatgttggtcaggctggtcttgaactcctgatctcaggtgatccgcctgctttggcctcccaaagtgctgcgattacaggcgtaaaccaccacgcccggccagctgagctgttattttcacaacacttgacctgagtctgaagtgatcatcagcatccttatcattacacatttggtgagctttgctcctttttggagtgtactgtggttgaagtttaatggaaaggtactcacagaaaagttttcttttttcctgtgtttcaccttccaggaatgttccaaaccgttacacctttccttgtccttactgtcctgagaagaactttgatcaggaaggacttgtggaacactgcaaattattccatagcacggataccaaatctgtggtgagtaacctttttttttttttttaaacttcattaagggaaaggatcaagcttggagaaaaatgacgggattagtagaatgaactcctgtgtgcccttcacctagattgacagattgttaacattttaccatatttgcttaaccatgctctatagtacacattttttgctgaccacttgggaataagctacagataccatgaccatttttgcaccctgaatacttcgcaccctgatacaggagtgtgtatgtcttaagaacaagaatgttttcttggaaaattatatttttgtgtgtataattaatcatattcaagaaatttaacattgattcaatctaatgtctaatgtgaaattcatgttttaattttaacaattgtaatgtctttcatagcaatttccccctccccccaaggcagaggcagggatggtacacgagttctctgtcctctgggtgctacattaagtcatgtgatgtctgttgttggtaacattaacttggttcccttggtgtccaccaaatttctccatgaagctgccattttatttttggaagtagcttcttcatagttgtggggaaagaggatttaggtgaaattattaggaaaaggcttatcaatccttggacattttactcagatattacctactggcatgtgtagtctcctttaaaaaaaaaaaaatgtaggctgggcacggtggctcacacctgtaatcccagcactttgggaggccaaggcgggtggatcagttgaggtcaggagttcaagatcagcctggctaacatggtgaaaccccatctctactaaaaatacaaaaattagccaggcatggtggcgggcgcctttaatcccagctacttgggaggctgaggcatgagaattgcttgaacctgggaggcagaagttgcagtgaactgagatcctgccactgcactctagtctgggcagcagaacaaaactgcccccccccccccccccccccccaaaaaagtatttgttccatcttagcaatgtgttacctttctctctcaatgtgattgacagaccaggtctttttttatagttaggtgtatacttcctctatagttttaatttttccatttatctcatactgcttctcttgaactacatactctgttgtatgggcagccttcagctccattgctgtaaacagtggtgcagaaattttagaattttaatgagcttttgtgagagtactagggcagctatcaatgctcatcttaagatggaactggccattttgagaaacatatctttgcctgtatctatgtatgtttataagctaaagtcttagatacagattgacttggttaaatgttacttgcactcataattttgttggatactgttattgctgaacttttctggtatggcagcctaattttctgtctttttcccctcctttggcttctgaaatccctctgattatgttgtctatgttgaggccttctcttcagcctttggccctctgttctgtcttcctctccctctgcaagttttttttttttttttttttttttttttttttttttttttgaggcggagtttcgctctgtcgcccaggctggagtgcagtggcgcgatctcgactcactgcaagctccgcctcccgggttcacgccattctcctgcctcagcctcccgtgtagctgggactacaggtgcgcgccaccatgcccggctaatttttgtatttatggtagagacggggtttcaccgtgttagccaggatggtctcgatctcctgacctcgtgatccgcccgtctcggcctcccaaagtgctgggattacaggcgtgagccaccgcgcccggccctctgcaagttcttaactctgcgtttctcccttccctttagaagccatctccttttcagtctctagtcccaccctatgttctagctccccagctacagctgcctgcccaccttttccactcagtcttctaccattccagatttctctcttgtcaatcccctttatcactgtatcttccttgctgtggggtagggttccacctttaagtgggggcacttaggtcttctctctccctggcatgagttttctgcactcactggtctggttgtttacatgtgttgacagtaactgccgccttctggccttttctccgtgctgctgcctctcttctggagcacaatttttttttttttttttttaagacagagtctcactctgtcacccaggctggaggctggagtgcagtggcacaatcttggctcactgcaacctccacttccagggttcaagcgattctcatgcctcagcctctcaggtagctgggactacaggcgtgtgccaccatgcaaggctaatttttgtatttttagtagagaagatgtttcactatgttggccaggctggtctcaaactcctgacctcaggtgatctaccgctttggcctcccaaagtgctgggattacaagtgtgagccactgtgcccggcctggagcactctttcatgtcctctttgcctttccaaatacttcccaatcttcaaaaaccaaatcaaccttttgtgtgagggcttttcagcctgatccccctcttctgagcatttcctttgttaagatgcatgtaaggctgtgttttacttccctgggacattgctcatcggcttattttcttagttttcctcatgcttttggattgtcttgtgtgctggattggaaggccagtctaggccccccaccaggctgactcacttctctgcttacagtagggaatgagaaagggtggtatcatgatttgaactttacccagtcccacgtgtcatttgacttgagctggaaatttgcagtgtttttttgggctgctgatgtgcacaggaaggagttactggccctggacagtatgtcaggaaagctgtcctggaagaaaggaggccagacacaggccacagagggctggtgcaagcttggaaattgggtgcctaagaccttgcttttgtgttgaaaggtttgtccgatatgtgcctcgatgccctggggagaccccaactaccgcagcgccaacttcagagagcacatccagcgccggcaccggttttcttatgacacttttgtggtaagtctggagcctgggctctgatccctcccctgggggagtggcacggctacttcactcttctcaaaaggggaaatggggatccccagtgttgaactttgtcgctgttgtgatgggcttccagtctgtatactggatacagtgataaaggggattgacaagagagaaaagaagactgagtggaagaggcgggcaggcagctgtagctggggagctagatgggcttccagtctgtatactgtagctactatacagtttctattcatgggccaggcaggtggccagagtgacatttatttacttacatgagatggagtcttgctctgtcgcccaggctggaatgcagtggcgtgatctcagctcactgcagcctccacctcccgggttcaagtgattctcctgcctcagcctcctgagtagctgggactacaggcgcatgccaccatgccccattactttttgtactttcagtagagacaggctttcactatgttggccaggctggtctcgaactcctgacctcgtgatctgcccaccttggcctcccaaagtgttgggattacaggcgtgagccaccacgcccggcccagagtgacatttaagaagatgatctgggctgggcgcagtggctcacacctgtaatcccagcactttgggaggccgaggtgggcggatcctgaggtcgggggttcgagaccagcctagccaacatagtgaaatcccgtctttactaaaaatacaaaaaaattagccaggtgtggtggtgggcacctgtaatcctagctacttgggaggctgaggcaggagaatcgcttgaacctgggaggcaaggttgcagtgagccaatatcgtgccactgcactccagcctgggcaacagagcaagactgtctcaaaacaaacaagaagatgatctggtcagtctttgagacagagacagtgatacttgctctttccatctcctagccctgccaccaaatttttgtctacttttcttgtggtttatataatttctgcctgttatagaacttggtttggggacaggtgcggtgcagtggttcatacctacaatcctagcatttttgggaggctgaggcaggtggatcgcttgagctcaggagttcgagaccagcctgggcaacatgggaaaaccttgtctctgcaaaaaatacaaaaagtaaccaggtgtggtggctcctacctgtagtcctagctactttgagggagctgggacaggaggatctcttgagcccaagagacggaggttgcagcaagctgagatcatgccactgcactccagcctgggcaacagaatgagaccctgtctcaaaaaaaaaaaaaaaaaacaaaacacacacacacaacaacaatttggacttgggaggctcaatctcgcatgtccatggggaccataattgaaatgatcctcctgaggatttccaagccaggtggtgcctgactcgttatgctgccatcaccttgttttcctatggaaatgcaggcgcagcattgcctagcttctccaccccccatgcccaagcaggacaggaaaatttcacaggaggtttcacaggttttaattatcttcaaaaatacttcaggtcaaatagcatatatccactagccaaatacggctgtcaggtttatattctttccctagagctggatggtttcaaaggggcacactgttgtcttgccattatagtagtaggtaactttggccaactatatcaagtaaacctcttacttacatatatagatgtcaagttaggattttagagtggtattcggtcttgatggctgaatttcagtatctaagaaagaaagctctctgctaaattgtcataaagaatattttttctcagtctgacagtgtctgaaactcagacttcagaataactgccctttttgttaatgtgacacagatgaattacattcatctgtgtcacattaacaaaaatgactcattaaaaatgagtcctaaaaatgactcattaaagagggctagttgcgctatagtttctgctgtattgtatggctctaaaaatctgattctgtactgtgcactgattccacctctcagaaacaactcttcagctcagtgcatctgcgtgctctgttccgacagacttacaaatgttctgagcacttggtctgtgccagcctccattcgtgtgctgtctgggtttctcaatctccatttaagggaggcatccttaacttcatttaagaatcaggcagcagactgggtgcagtggctcatgcctgtaatctcagcactttgggaggccaaggcgggtggatcacgaggtcaagagattgagaccatcctggccaacatggtgaaaccctgtctctactaaaaacataaaaattagctgggcatggtggcgcacgcctgttagtcccagctactcgggaggctgaggcaggagaatcacttgaacctgggaggcagaggttgcagtgagccaagactgtgccactgcactccagcctggcaacagagcgagactccatcaaataaaaaaaaagagaaggcagcagagacagattaattttcccaaagttacatacctagcatcacaaacagttgcactggggatccggtccctggcaacctgctccggatccagttgctaggctgtcctgcttctactgaaagccagtctttgcatctagaaacagttgctgaggctgcatgtctctttttgcccttaggattatgatgttgatgaagaggacatgatgaatcaggtgttgcagcgctccatcatcgaccagtgagcagagtccgtgcttgctatctgtctcatgttacagagcttccattacatattaaacgtgaaatctatgactcctgtaccttacctgttcaacagacctgaaaatgagccatggcattgggacagggtcacttctgacaggggaagtgggtccccaggtcagcccttctcttccctttgggctcttgccaaagctgtcttcccctactgttaaccttgtttgtcacacggtcgagttcgtattggttctcggctacttcctggagcttctgccgcctcctgtggaagataatctagcttctccacctcttgtttcacactcattcctcccatccagtgtttgtctctcgggtccttcaagccagccaggaccttttctgggtcatgaatagcacaatgaagcaagtgtctcctttccttgtccccaaggtgtgcagactttggcagccgtgcacctgaccagagctgaagctcccgctgggctgtggggttgccagaagctggggttgccatcccggggtacatgtcaccagtcctcttggggttttgtaccatctgatgctggaagttttgattagtgatattttctactactacatatttagagttcactggttcagtcttaaatgcctgcatggtgcctttttaggataaggtataaccatacatttttggtggaagtgtttctgggttagggaagttaaagtctgtttatccgtaagtggggaggagggtcagctaagagaagtgggagggccagagctttttggttctgatttacaaattaatgaagtagtttcaaacaacgcggtcatgtttacctctccatttgggagcctgcctacattcttgttctagaagcacaaaaaatcctcagatgaattagaagaaagaggtttggggactcagcggatactagttcttttaccttctgcttggtaacttagattaaactgagcattgtttttctgtcacaaatgttttccttatgacactggtttcgacatgtaaaatgtgtttgaaaacctgctttgtagatgcagagagaagctataggaaacccagtaccacccctggtctgttctgacgagacatcgttcataaggcacagcacatcgcaagatgaacagttgttaataaaagctgttgctggaaacttgctttaggaacagctcaagaaccttggagttcatatttcacaaatattaataaatataagtccaagagctgtcagcctaatctgtaggagcagaacctctgattgaccaaaaggcatatgggtttaggttggttttttgatgtcatatgtctctgatggggctgcaagtgctacctcgcgcttgtacactgctgctgtggggctccgcgcctgccggtgaagagctgcagatgccgagaagccagcaaacacagggcccactggaaaaaaatagttttttcattagtatttctcgggaggacccaaaagttaaggtcagcttgttcactgtaatttctggaagaagttcactcagaccttcctgaattcagatcatctcagaagtctggagggaaatctggcgaaaccttcgtttgagggactgatgtgagtgtatgtccacctcactggtggcaccgagaaacttacttccttgtattaagtgcacttcttgtatttctaataagatgactttccagaaagtgagatttgttatgttctggcttttaaaaggtaaaatataaataaatttcataacttaatctaagtggtaagctatggttcttgttttcattcaacacatttgccatagcatgggcttggggagtctccagaagatggttaccctttctagaagggaagttcttgcttgttgctgagtcctgtttggcgtcaaatctcagctgatgccaccagctgggcctcatggtgcctgtcctctggaaaaagaacacttgttacagttgggaggctctgggaggtgagaagtggcagcgctccatatagcaaggctttagacatgcggcttctgctacgtgcgggtaacagcagcagtgctgagggcttgtagtaaaggggctccgcagggtcaagtttcaggtcctggatgtgtttaagttcatactctgctgttagctgtggggcatctagcgaatattttctgaacctgtctcctatgaagtggggataattttatctgcctcttaaggatgctaggatccaaggagcaaagtacacagagctctccctgcacagcgctgcatcgtgggtgctcactgtagtgtttggctgcttgagcttcattccaatcccatagaaacgttattttttaattttttttagtaagagatagggtctcactatgttgcccaggctgggcttgaacccctgggctcaggtggtccaccttggccttccaaagtgctgggattacaggtgtcagtccgagcctggcctggaacctatttgttttgttttgcttttttgagtcagggttccgctctttttgcccaggctggagtgcagtggcgcaatctcggctcactgcaacctctgcctcccaggttcaagtgattttcctgccccagcctcccgagtagctgggattacaggcgcccaccaccatacccggctaattttgtatttttagtagaggtggtgtttcatcatgttggtcaggctggtctcctgacctcacgtgatccgactgcctcggcctcccaaagtgctggttttacaggtatgagccactgcacccggccctggaacctcaaatttaatacagccgagacagttcagcatctccaatcttcacccatgccttcttttgtattattccatcttgcagtggtaactacccaagccagaaacctgggaggcctcttcctccctcacatccgtgcaggccacctctgtctaagtatcagctgagtcctggacgccagttacctcagaatattgcaatttgtgcctgtttctttgaggtctgacatcctctggaaatgaagtcccgtgtcacgccaaaacaggtcgagaaaatgacactggaactgagacctgaatgaaatggggagaagcccagtgaccatgttggggaagaggattccttgcagagggaaccaagttcagaggccttaaggtgggagcccatgggttacacttgaggccctgcagcaaggaggcggctggtaagcccatggtggagtgaatgagggagagaatgaggcagcacggggcagtctggaaggcagaccagaggggctgtgtacacatggtcaggccttgggcttttctcagtgagcattcttgggttctaagtgaggtgatccagcttagattcctaaaggatgcttctggctgtgtttggagaagggactgtagtagggaaacaggaagcagagaccagggaggcggctgcaggaatccaggcagctggtgatgggggcttggaactgtgtggtgatggtggtggtgggattttgaggtagtctgacgtggtcaggtatgttttctgtgtttttttgagacaaggtctcaccccgtcacccaggctggagtgcagtggcacaatcttggctcactgcaacctctgcctcctgggctcaagcagtcatctcacctcagtctcccgagtagctgggactacaggcgtagccaccacgcccaggtaatttttgtatttttggtagaaacgaggttttaccatgttgcctaggctggtctcgaacccctgggctcaagcgatcctcccgccttggcctctcaagtacctgggaggccgaggcaggagttcaagaccagcctgaccaacatggagaaaccccatctctactaaaaatacaaaattagccaggcgtggtggtgcatgcctgtaatcccagcgactctggaggctgaggcaggagaatcccttgaacccgggaggcggaggttgcggtgagccaagattgcgccattgcagtccagcctggacaacaagagtgaaactccatctctaaataaataaaggcattctaagttctgcatggctcaaactgaactcatccaccaccttcctaccaccccacactgtgtgcttggcttctctttcccggcagacgtaaccaccatccttctaattgctcaagaattaacccacacctcatctttaactccttgtccacctccatgccccatattaccaaatcaagttaattttatttatttttatttttttgagacagattcttgctctcttgcctcaagttaattttagctcttaaataacacatttgggccagatgtgggggcccacacctgtaatcccagcacttgggaggcctaggcgggcagatcacttgaggtcaggagttcgagaccagccttgccaacatgatgaaaccctgtctctactaaaaatacaaaaattagctgggcatggtaacgggtgcctgtagtcccagctactcagtaggctgaggcaggagaatcatacgaaccctggaggcaggggttgcaacgagccgcagttacgccgctgcactccagcctgggcgacagagtgagacaccgtctcaaaaaaataacaaaaaaataatgttggcaaagcctgagtcctgtcctctcgctctccccactggacagcatgaccttcaccactcgctccaccttctccactaactacccggtccctgggttctgtccaggcgcccagctatggcgcccggccggtcagcagtatggttagcgtctatgcaggtgcccggggctctggttcccggatctccgagtcccactccaccagcttctggggcggcatggggtccggggacctggccggggggatggctggggatctggcaggaatgggaggcatccagaacgagaaggagaccatgcaaagcctgaacgaccatctggcctcctacctggacagaatgaggagcctggagaccaagaactggaagccggagagcaaaatccgggagcacctggagaagaagggaccccaggtcagagactggagccatcacttcaaaaccatcgaggacctgagggctcagatcttcacaaatactgtggacaatgcctgcattgttctgcagatcaacaatgcctgtcttgctgctgatgactttacagtcaagtaggagacagagctggccatgcgccagtctgtggagagcgacatccatgggctctgcaaggtcactgatgacaccaatgtcacttggctgcagctggagacagagatcgaggctctctaggaggagctgctcttcatgaagaagaaccacaaagaggaagtaaaaggcctataagcccagattgccagctctgggttgactgtggaggtagatgcccccaaatctcaggacgtcagcaagatcatgacagacatgcaggcccaatatgacaagctggctcagaagaacagagaggagctggacatgtactgatctcagtagattgaggagaacactacagaagtcaccacgcagtccaccgaggttggaactgctgagatgactcacagaactgagacatgcagtccagtccttggagatcgacctggactccatgagaaatctgaaggccagcttggagaacagcctgagggaggtggaggcccgctatttcctgcagatggaacagctcagtgggatactgctgtacctggagtcagagctggcacagacccaggcagagggacagtgccaggcccaggagtaggaagccctgctgaacataaggtcaagctggaggctgagatcaccacctactgccgcctgctggaagacagcgaggacttcaatcttggtgatgccctggacagccgcaactccatgcaaaccatccaaaagaccaccacccgccagacagtggatggcaaagtggtgtctgagaccaacgacaccaaagttctgagacattaagccagcagaagcagggtaccctttgggaaacaggaggccaataaaaagttcagaggtaaaaaaacaaaacaaaacccacatttgtgttttcttatcatcccactggcacctacatttttttttttttttcgagatggagtcttgctctttcgcccaggccagactgcagtggcgctatctcagctcactgcaagctctgcctcccgggtccacgccattcttctgcctctgcctcccgagtagctgggactacaggcgcccgccaccacgcccggctaattttttgtatttttagtagagacggggtttcaccgtgttagccaagatggtcttgatctcctgacctcgtgatccgcccgcctcagcctcccaaagtgctgggattacaggcgtgagccaccgcgcccggccggcacctacatcttaaaagccactgtgatctcatctgaaatactgccacaactttccatttgacctctctccattgctgcccagccaacatccagtcctccgccaccaagcagccagaaggatcttccaaaaatccaaatgtgaccgaccatatcctttaaaacccttcagtggcttcagttaccctcaaagccccacacctcacagggtcctcaagaccctgtgacctctgccaactgcctacgtctccaacgtcggcttcttgtgaaaggtcagaatcaaaacgtagtcaccagtattaaacaaaacaaccctgacaccaagagcgaaactccgtctcaaaaaaacccccaaaaaaccctgacacagagtcagggaaggctatgcagtgaatgcttgcatgcctgataacaaaaaccatcacaaaagactctgcaaaaacacaaccttgcacaaaggccatcgcaatgcaactttttttttttttttttcgagacagtttcactcttattgcccaggctggagcacaatggcatgatcttggctcactgcaacctctgcctcccaggttcaagcgattatcctgccttagcctccctagtagctgagattacaggcgcgcagcaccatgcccgggtaatttttgtgtttttagttgagacagggtttcactatgttggccaggctggtcttgaactcctgacctcaggtgatcttcccgcctcagcctcctaaagtgctgggattacaggcatgagccactgcacccggcccagaatgcaactttatacaaaaaatacttctacaaggacatctgcccagcaactgcctgtacaacctcacgctgccttcacccttgttaatgatctttgtagccaaagataaattttcaaaaaaattatgtgcccagcgcagtggctcccgcctatcatcccaacattttgggaggcccgaggcaagaggatcgcttgaggccagtagttagagaccagcctggccaacatagtgagatctcgtctttgaaaaaaaaattatttttaattatgtaggctgggcacggtggctcatgcctatagtcccagcactttgggaggcagagatagaaggattacttgagcccaggagttcaggaccaaagccagactaacctcaaaaaaaaaaaaaaaattagctgggtgtggtggcacccgcctctggtcccagctattcaggaggctgaggcaggaggattgcttgagcccaggaggtcaaggctgcaataagccaagattgtaccactgcactccaacctggatgacacaacgggaccctatctcaaagataaaaaaaaataacaatttttaaaaagtaaccctcattttgtcctttaaacaactttgtctgttccatagcttggttgatacttgatcatcaaaaagaaccaacctttgtctatccaggtgtggtggcacgtgcctgcagtcccagctactcaggaggctgaggcgagaagatcacttgagcccaggagttcaaggcttcacggagctatgattgtgccaccgcactgcagcctgggcgacagggggaacttgtttcaaaaaacaaaacaaaagcttttgtcttcctttacctccctgaatatgcagtagtttgctatgacaaatgtattcccatggtaatgctctattcccgactaaatatctttttcttctagggagcctctctctgttatttaggttgacatatatggtgtcagaaatgggacctgaaaaagattagtactggaagaaatcggtgattcttggaactggtgtacagtattcactagagccctttgagcgcactgcttccatggctccccttttctgccctggtgagtcttctctcaggttgagcctccctctttttggtagaggcttttttgttttgttttgttttagagacagggtctcactctatcccctagactggaatataatggcacaatcatagctcactgcagccttgaactcctgggctcaagtgatcctcctgcctcagcctcccaagtagctgggactatagacgtgccaccacacccacctaatttttttttttttttttttttttgtagaagcagggacttgctatgttgcccaagctggtcttgaactcctggcctcaagtgatccgccctcctcaggctcccaaagtgctgggattacaggcgtgagccacatgcctggccaaaagtgtgcgctttttttttttttttttttttttgacggaatctcagtctttctcccaggctggagtgcagtggtgcagtctctgctcactgcaagctctgtctcccgggttcacgccattctcctgcctcagcctcccgagtaggtgggactacaggtgcccgccaccatgcctggctaatttttttgtatttttagtagagacggggtttcactgtgttagccaagatggtctcaatctcctgacctcgtgatccgcccacctcggcctcccaaagtgctggaattacaggcgtgagccaccacacctggccaaaaaatgtgttctttattgaaaataaaagaataattttgtttaatttggagattatgtaagttttttgaaaatatgggctggctgggcgcggtggctcacgcctgtaatcccagcactttgggaggctgaggcgggcagatcacctgaggtcaggagtttgagaccagcctggccagcatgatgaaaccccatctttactaaaaatacaaaaattagctgggcgtggtggcacgtgcctatagtcccagctacatggaaagctgaggcaggagaatcacttgaacctaggaggaggagcttgcagtgagccgagattgcgctaatgcactccagcctgggcgacagagcgagactctgtctcaaaaacagaaaagaaaaaaaaaagaaaatatggacttatgaaggaaatagaaacaagatagtaagaaaaccaataactgagagacagagatatgaaggaagttatggttatgaagatatattttttaaaaggaaagttgaaaagaataattttgtatgggaaagagtctctggtaaatttatgttctaaagtaaaatgattggtatttaatgaagaggaagtataagacagggcacagagtcaaagcacatcatcaatggtctgaataagtcatgatggtgttcatgaagggagaacttatgaaaggcattttgtgtgtcatcaagttggctataattagaagggaattatttctacgtctttctaaagatagattaaaaatacactgatagaaaactaaaaaattcatatcccctatgttaaaacaactaggttttcttttttcttttcttttttttttttgagacggagtctcgctccgtcgcccaggctggagtgcagtggcacgatctcagctcactgcaagctccacctcccaggttcacgccattctcctgcttcagcctcccgagtagctgggactacaggtgcccaccaccacgcccggctaattttttctattttttagtagagaccgggtttcactgtgttagccaggatggtctcaatctcctgacctcgtgatccgcctgcctcggcctcccaaagtgctgggattacaggcgtgagcccctgcccctggcccaggttttcttcttctttttttttttttttttctctgagacagagtctcgctctgtcacccaggctggggtgcagtgtcgcgatctcggctcactgcaacctccgcctcccaggttcaagcaattctccgtgtctcagcctcccgagtagcttggactacaggcacactgccacgcccacctaatttttgttattgttgttgttgagacagagtcttgctgtgtcgcccaggctagagtgcagttgcgtgatctcggctcactgcaacctctgcctccctggttcaagccattctcctgcctcagcctcctgagtagctgggattacaggcgcacaccaccatgatttttagtagagacagggtttcaccatgttggtcaggctagtctcgaactcctgacctcaggtgatctgcccccctcggcctcccaaagggctgggattacaggcatgagccaccttgcctggcaggttttctttttcttttaaatttgtatttattttttgttgtagagatgggaatctcactatgttacccaggttggtctggaactccgggcctcaagcagtcctcatgtctcagcctcccaaagtgctgggattaacaggcctgagtcaccacacccaagccaattaagtctgtttgaactggaatgaacttagggattttgcagttgggccagtggagggcctctaatgatgtatttctcagcttgtagagatattaaatgattaggtttatctggtaagttgtacaggaagcattgtcaagtgataagtgattctattactagatctttcagttacatttatgggtctgttattgatataaatatttcaaaaattatataaattcatagatacctaatattatctgtcataattttggttatgttaatctcttctaaagttaaatttatctggatattttattaatgtgagtttgtttttttttttgagatggagtctcactctgttgcccaggctggagtgcagtggcacgatctcggctcactgcaagctccacctcccaggttcacaccattctcctgcctcagcctccagagtagctaggactacaggcgcccgccaccacgccaagctaattttttgtattttgtttagtagagacagggtttcaccgtgttagccaggatggtctcgatctcctgacctcatgctacacccgcctcggcctcccaaagtgctgggattacaggcgtgagccaccgcgcccggccgtgaattttttttttttttaatttgagacagagtctcacactattgcctgggctggagtgcaatggcacagtctcagctcactgcaacctccgcctcccgggttcaagcgattttcctgcctcaacctcctgagtagctgggattataggcacccacgaccagcctggcttattttttgtattttttagtagagacagggtttccctatgttggccaggctggtctcgaactcctgaccttgtgatccacccaccttggcctcccaaagtgctgggattacaggcgtgagccaccgcgcccggccaattaatgtgaatattctaaagattatattcaatttataaaagtctgatgtttcttgtgtgactgtgtcagtcatgattctggttgttatcttaaaatactgtatatggccaggtgcagtggctcatacctgtaattccagcactttgggaggtggaggcaggagggatagcttgaggccaggagttctaaaccagcctgggcaatatagcgagactccacctctataaaaaattagccaggcatggtgatgcacccctgtggtcccaactactcaggaggctgaggaccctttctcttttagagagcctctctctctgttatttaggttgatattttcacatctacttctgcactctttttactccaaccacacgggccttctttttttttttttttttctttttttgagacagagtttcgctcttgttgcccaggctggagtgcaatggcgcaacccaacctgcttcaccgcaacgtctgtctcccaggttcaagcaattctcctccctcaacctcccgagtagctgggattacaggcatgcgccaccatgcccagctaattttgtatttttagtagagacagggtttctcaggctggtcagactggtctcgacatcctgacctcaggtgatccgcctgcctcggcctcccaaagtgctgggattacaggggtgagccaccgcgcccagccccatacaagtcttctttctgcacctcaagtgggtcatgttccccacctcaaggagtacacacgttccctttcctctggaatatttggtgccccaggcccatctttgccttttttaaaaattttttttttcagatagggtcttgcttcattgcccaggctggagtgcagtggcaccatcacagctcactgcagcctctacctcctgggctcaagggatctgccttgtcctcccaaagtactgggattataggcacaagccaccgcacctggccaaatacttttttagtataaatattttccaaatattgcatacgagtgtgaataatttgcacaagcaggccaggaagtaaatgccaggaatgttcatcctaaaaattatttgctgtttatctgaaattcacagttaactgagcattctgtatttttattggttaactctagcaaccctactcgacatgtttgcagaacaaatgttctgaacatctgctctgtgccaggcaactcacaccttctcattaagttatttgtccaattacaagaaattaagctcttgagggtaatggctgtgtctgtcttatgcaccaccggcctccatgcctgaccccgggtagactcaataaatgttcctagaattgaaatagaactaaaaaagaatttccagtggttactttctttccatggcagcttgtccaccctggaaggagtctggtgcagcggtaaggagagcctgaagggggcagtgtcaccccctggctctggcttcctgttgtccatcaccatggggaggcagggcctcaaatcggaagcacatgaaactggaacttggaaggcagaggaggcaagacaggtgggcaggcaagatggctactgccaggtggggtctgacctgctcaggtcctcaatgtggtccctttattcctcccttgttactccttggctttctgcggtgtcttctgctgaatgtctcatgcagggctcagctgggccctatgaatacaagaatagcaacaatgatggtaattattttcattcctggttcctgacaataattttgatttaatcctccccactttaggccctgaaaggtgatcaaaaccaggcattcagtttctccaggaaagtggatctcatggaattatcttagccagcattggtggagggatactaaatagcattacctttacagatgagggaatggagcccagagaagctgaggtcatttgcccaggacaagaagtgagacttgatattccagtgcagaggtgcgattagatgtatagtcccccacacagactgtgtggagtctcctattcccagcatccacactcactagctgatctaggggtcagctgatcactcactagcttgaccttggacaagttattctaatctgtgcttatctgtaaatggggctaataagtgtctttctcgtagagttgtgggaatttagtgaaataatccagagcatggcacaatgtaagtgcttaatcaatgcgagctaccaatgtcactattgtttgtcccctccattcctaagccctcccagggcccaaccccaccccagcaggctagctgttaatgtttgatgactaaacattactatgaagtgaagtgattccctaatttggcctgaagagatgaattacctggaaggcactcgctacagaaatctattctcaggtccctgccttagagattctaattggtggggcctgggaatctgtatctttaaaaaagcctcgggtgaaatctatctgtaggctgatttcgaaagtccttatgtaatgtaaaaccggaaagacagggcgcggtggatcatgcctgtaatcccagcactttgagaggctaaggcagttggatcacaaggtcaagagatcgaggccatcctggccaacatggtgaaacctcatctctattaaaaatacaaaaattagctgggcgtggtgacatgcttctgtagtcccagctactctggaggctgaggcaggagtaatcgcttgaacccaggaggtggagggtgcagtgagccaagatcatgccactgcactccagcctggctgacagagcgagactcgtctcaaaaaaaaaaaaaaaaaaaaaagaccggatagtgctacagcaaacacattgtgacaggggtggggtggaggcgcccggtgattagaatcggtggactagctcagcccttacaggttacaagaatttaaagtgatgattaccttttctgattataaaaatcatctagggctgggcgtggtggcttacacctgtaatcccagcactttgggatgcctaggtgggaagatcacctaagcccaggagttcgagaccagcctgggcaacatggtgaaaccccgtctctacaaaaaaatgtaaaaaataagccagacttggtggcacacacttgtaatcccagctaggaggctgaggtgggaggatctcttgagctgaggaggtggagggttgcagtgagccaagatcccgtcactgcaccccaggctgggcaacagagtgatacactgtctcaaaaaacaaaacaaaaaactagtctatttacatggtctcagatgatcacatacattatttagaaagggaaaattagtgactttgtagaatcactgctagtggcgaaacctagctaatcccatcttaactaagcgatgaaagttactatcacagataatggaacagaccatagatgactcaatgggatgcactgaagaggcagcaccacttctgtggttccaggcaggaaaacatacaagctcagtgtcatcataaggaagcaccaggcaaatgcaattgagggacagtccacaaatcttccaaaatgtcaacatcagaaactacagatgcctgacaacactgcaatgctgcatgatcctgaattgaatctttgagggtgtgggggttgctataaaggatgttattgggccagttgaatatggcctatggaataaggaataagtaattgatccatgttagatttcctgattttgataatgatatcagagttacataatagaatgtccttgttcttagcagacatacagtaaagagtataggggtaaaggggcatgacatctctaatccactctgatatggtttagaaaataatagtgtacgtgcatataaaaatatatatacacacacacatgaacacgcaggtaaggtataataaagtaaatatgcaaaaatgcacagtgttaaaaattataatgccccttgttaaaaaaaaaataaccgggaagaaaaatataaagaagaaaatggaagccactcctactcctacccccccgcccccctttccctccctgcctcccctatcccccgtccctgagacaaccaggatgactatttcaatcagcagtgaaactcttacatgtctttgggtcgttttatatatatgtatatatgtgcatatatatatatgtgtgtatatgtgtgtgtgtgtgtgtgtgtgtgtgtatatatatatatatatatatatttttttttttttgagacagagtcttgctctgtcacccaggctggagttcaatggcacgatctcggctcactgtaacctccgcctcccagggtcagggtcacagggtcaagtgattctcctgtctcagcctcccaagtagctgggattacaggcacatgccgccatgccaggctgattttttttgtattttagtagagacagggttttaccatgttgccctggctggtctcgactcctgagctcaggcaatccacccgccttggcctcccaaagtgctaggattacaggcgtgagccacctcacccggcctggggcattatatttttgattgaaactgaaatgcgtgaatgctttactttccatctataagttgtgtttttcactctgatgtatgtcaatatctttccatgttaatgtgctggtgtttcaaatggctgcatgatgctgcctggtagggacagagcatactttgtttatcaataggtgtttaggttgtttccagcttgactcctacagacagtactagagtgagcatccttaaaaatacatcttccccaacttgtcagattattttgtttgcagagctgctgggtcaaaaggagagagtctctgagaagggacagaggctgacagtcggggagactgcaagagaaagactgagagagagagagagatctatagaagcagagagagggggaaagaaacagatggagagagacagaggctgggtgcggtggctcacgcctgtaatcccagcactttgggaggctgaggtgggcagatcacttgagttctagagtttgaaaccagcctggccaacatggcgaaaccctgtctccgctaaaaatacaaaaattagccaggcttggtggcacacgactgtagtcccagctactcagaaggctgaggcacaagaatcgcttgagcctgggaggcaaaggttgcagtcagccgaaattgcaccactgcactctagcctggccaactgagtgagactctgtctcaaaaaaaaaaaaaaaaaaaaagagatggagagagacgagaaagagcaaggttgagggttgagagagagcgagattgggagggtgacagggagttgctttcgatggagactgagaaggaattcctctgacccatggggtctctatggccacaggaatccagtcaggaaagtgactaagtgacttttaggaacacacccaacagatacaatcgtagatgaggtcagagtcctttgtgcaaggatcttcatggggctattgttcctggaaagcaaaaaatgggaaacgacctaattgcccatcaacaggggactggttatagattgtgctggaaatgctgatagaagcccatctccaagtagggttggcagataatagcaaataaaaccacagaaggcccagttaaatttgaatttaaaatgaagcatatgtctcatgcagccttccttatacactaaaaacctatttgttgtttatctaaaattcacatgtatattttatctggaaactattaatctccaagataagtgagaaaagccaggtgaggtcaggagaggggttgctcttggtgagggtgtgtgtgtatttgggctgctgaggtggccgtcagtttcagctcctgtcctgggtgtggttacacttgaagggaagggactgatccgggctcacataagcagaggttgaagggctaggctccactccagggtccgtgctctgtagtgatttgtatatatgtgttaaaagtgttttcaataaaagtatgacagaccacaattttctaaactccatttaaacatttctgatttaaaaaaataatactagcagtctcagctgggtgtggtggctcacaccagtcatcccagcactttgggaggccaacgcgggtggatcacgaggtcaggagttcaagaccagcctggccaagatggtgaaaccctgtctctactaaaaatacaaaaattaaccggacacagtggcaggcgtctgtaatcccagctacttgggaggctgaggcaggagaatcacttgaacctgggcggcagaggttgcagtgagccaagatcacatcattgcactccagtctggacgacagagtgagacttcgtctcaccaaaaaataaaataaaataaaataaaacaacaacaacaacaaactggcagtctcagaaactctaaggggcctccctgaacattttcatttcctggaacactcatctgcccctgggcttttttatcactgtcgcctggaatgccctcttaccccaccccacccccaaccccctcattcacctgctcatgcctgtgacctcaacctggagtcagcctggttctcactcctctgagtcaccttaggtgcctcggagttgcaagaacactgaaccagctgttaccccctttcccccctcgcctgtgagctacgcaggtgcaggaaccttgtctgtgtgcagctggtttatcacagtatcctagcccattcagccaggtacatgccacagcttactcactacaccttggacatgttagtaaagcgtctctctgagcctcagtttcctcatttgtaaaatggagctgatcatcttgcctaccactcaaggccaatgtgacagagatgggaaagggaaatggcattagcatcactaaggtaatatttcaactgaggccagcactgggaagatctggggaagggtattccaggcatccttgggaaaaaaaaggagactgcgggcagccgtgagagccaggtcactgcggtctgtgtggcagccaagtccctaagaaaaaaaaaaaaaaaggagtttgctctcattttccccttcttgccaatacctctcacctgctgtgggtcaaaggtgcacaaagctctacaggtatgcaaggtaggtgcaggtaggggagccaggagaccctggggctttcctggaggcaggttcagccttctgcgaggaagatggagagagcagggctctatcagtgcagtctgatgggtaaggggcctaggcccgagacagtctgcgagcaagtgtgcgtgtatgagcccctgagcccgcccaccctgcaagtgcctggagactcactggggaaggtgtgttttgcactatagagacatcccaatggcctatctcagtccttgagctccagaggcatccatctcccaggcgtagagctgggctctggcaggtgtgtgatcggactcgggcaggtgcagagaggcctggcttcagggcccagctcagcccccacatgtccaccctcgaaggcttccacagctttctgttttccaaggtgaccacgtcatcccactttgtccaggattgccccagaacaccctcactgccaggcaaactggactggttggtcaccagacatattactccattggacagaggaagaagagtctcagaggctgtcagtatctgcctcattttttggggctgggtttttttcatgaaaagtttatttgaaatggtgacacatatatctgaaataaaacattcatattctttaaaaaaggcttctaggccgggcacagtggctcacgcctgtaatcccatcactttcagaggctgaggcaggtggatcacctgaggtcaagagttcaagaccagcctggccaacatggtgaaacctcatatctactaaaaattaaaaaaaaaaaaaaattagctgggtgtgatggtgcacacttgtagttccagctacttggggaggctgaggtaggagaatcgcttgaacccaggaggcagaggttgcagtgagccaagatcgcaccactgcagtccagcctgggtgacagagagagactccacgtcaaaaacaaaaaacaaaaaggctcctagaggccgggcgcagtggctcacacctgtaatcccagcattgtgggaggccaaggcaggtggatcacctgaggtcaggagttcgagaccaccctggccaacatggcaaaaacccgtttcttaaaaaaatacaaaaattagttgggcacggtggcaggtttctgtaatcccagctcctcaggagactgaggcaggagaatcacttgaacccggggaggtggaagttgcagtgagccgagatcgagccactgtactccagcctgggcaacagagccagactgcatctccaaaaaaaaaaaaaaatgcttgtagaaaaagaagacatctttctaccccaccctgctcctgtcctctgaagcagtcagcttcttggacctctcagagacagatattatttacttctgcacaaaaggcagcctattacatatgctgttcatctgatatatttttttaagagatgaagtcctgtgcttgcttcagcagcacatacactaaaattggaatgatacacagaacattaatgtggcccctatgcaaggatgacacacaaattcataaagcattccatatttttaattaaaaagaaagagaaagaaaaagcaacggagtcttgctctgtcacccaggctggagcgcagtggcatgatcatagttaactgcagtctccaactcctgggctcaagggatcctcccacctcagcctcccaagtagctgggactacaggtgtgtgccactatgcccaactaattattaattttgttgttgttgacacagagtcttgctatcttgcccaggctggtcttgaactcctgggctcaactgatcctcctgccttggcctctcaaaatgctgggattacagccgtgagccactgcacccagcccacttgaattttttcttcttcttcttttttttttttaacacctgatatttttttcagttaaaaatatgagttccggcagggcatggtggctcatgcctgtaatcccagcactttgggaggccgaggcgggcagatcacctgaggtcaggagtttgagaccagcctggccaacatggtgaaacctcatctctactaaaaatacaaaaattaccccagtatggtggctcgcacctgtaatcccagctacttgggaggctgaggcacgagaattgcttgaacctgggaggcggagtctgcagtgagctgagatcatcccactgcactccagcctgggcaacagagcaagactctgtctccaaaaaaaaaaaaaaagcatatatatacatacatatatatgtatatatacgcacacacatatatatatatgagttcattcatttcattcagctaataattactgaaccagaccctgttcttggtgctcaggtcatagtagcagacaagacaaagttcctgcctgtgtggagctgtctagagcagaaagtgaatgtttaggttttgcagacttaaatagcaaggatgttatgtcagtactcatataacaagagaaaacaaattcccacaaaatttttatggacaatatttaaattataataatatttgagtacaattttgtttttcatttttttaatttaatttttttttgaggcagggtctctcattgtcacccaggctggagtgcagtggtgcagtattggctcactgcagcctcgatttcccaggttcaagcaatcctcccacctcagcctcctgagtagctgggactataggtacacaccactacacctggctaatttttgtatttattttttggtaaagtcagggttttgccatgttggccaggctggtctcaaacttctgaactcaagcgatccacccttcttggcctcccaaagtgctgggattacaggcgtgagccaccgtgcccagcctgtctgtttttaaaatataaataatagagatagggtcttgatacattgtccaggctggtctggaactcctggactcaactgatcctcccgccttggcctcccaaagtgctgggattacaggtgagaggcactgggcccagccagttttttttgtaagcatgaattattattattattattattaattcaagacagaatctctgttgtccaggctggagttcgatggcacaatcaccgctcacagcacccttgacctcctgggctcaagtgatcctcccacctcagcctcccaagtagctgggactacaggcacatgccaccatgcctggctaagttttgtactttttgtaaagatgaggttttgccattttacctgggctggtctcgaattcctgggctcaaacaatccgcccgcctcaccttccaaagtgctgggactgccggcatgaaccatgaggtccagcaagcatggaattttgaaggttcacatattgccttaattgaggttccaagtaactgttatctaccattaaatcggttgcagtgttcatctgtagaagctactcttagctcaaggaccatacaagaaacaaaccttggtcagatttggcctgagggctgtagtttggcaacctccagtctaaagggaaatcaacaaaatcagtgaaacatacaccatgccagattatgagcgaagtggagaaaaactaagcagcaagaggggaaggcgtgccagagggaaagggaggagagggggatgaagtggtggcctgggaggctttgctgcgatggggggtgagccctgtggctatatgggagaagagctgggaggagacagggaacaccagatgcaaggtccccaaagcaggagcatggctgatgtggtttgccctgcagccggagccttgtgggcgatagtgagtatgggggctagggtggggagctcaaggggccacagggggccaatcctgtagggcctcgttgtgggccatagtgaaggctctggattttcctacaagagagctgggaccagggagggtttatgtacccacagaacagcatcgacatttttttttttttttttagatggagtcttcctctgtcccccaggctggatggagtgcagtggcacgatcttggctcactgcaacctccgcctcctgggttcaagcaattcttctgcctcagcctcccaagtaactgggattacaggtgcctgctgccatgcccagctaattttttgtatttttagtggacatgaggtttcaccatgttggccaggctggtctcgaactcctgacctcaagtgatccacccactttggcctcccaaagtactgggattacaggtgtgagccaccgcacctggccgagcatcaacataattttttttcttttttttttgagacggagttttgctcttgttgcccaagctggaatgcaatggcacaatcttggctcactgcaacctctgcctcctgggttcaagtgattcttctgcctcagcctcccaagtagctgggattacaggcatgcaccaccatgcccagctaattttgtatttctagtagagacagggtttctccatgttggtcaggctggtctcgaactccgacctcaggtgatccatccacctcggcctcccaaaatgcagggattacaggcatgagccaccatgcctggccaggcgtgaacattttaacagtcgtgaaagattccattgatgcgcctgttttacactcaacagttcctctatcatggacgactttttttttttttttgagacggagtcttgctctgtcgcccaggctggagtgcagtggcgtgatctcagctcactgcaagctctgcctgttgggttcatgccattctcctgcctcagcctcccgagtagctgggactacaggcgcctgccaccatgcccggctaattttttgaatttttagtagagatggggtttcaccgtgttagccaggatggtctcgatctcccgacctcgtgatccgcccgccttggcctcccaaagtgctgggattacaggcgtgagccactgcgcctggccgtatggacgacttttgctaccctattaaaaattaatccaattgtccagattcgtggctcacacccgaattccaatactttgggaggccgaggagggaggattgcttgagcctaggagttcgagaccagcctgggcaacatagcgagacccagtctctaaaataataataataataatgccgataatacttgtaaatgataaaaaataaaatcaagacatgggaaaggatatttagtaaagaatcttccttccacccctgctgacagctaccagcttctcctcagagacaggcacattaccctctctccagagatggtttaatgtcctaagaaatacctgtataatggtgttttgcaccttgctttttttttttttttttttttttgagacagagtcttactctgttgcccaggctggagtgcagtggtacaatctcggattactgcaacctccacctcacaggttcaagccatgctgcctcagcctcccaagtagctgggattacaggcgcacaccaccgtgcccaggtaatttttttatttttagtagtgacggggttttgccatgttggccaggctggtcttgaatgcctgacctcaggtgctccacttgcctcatcctcccaaagtgctgggattacgggcgtgagccaccgagcccggcttgcaccttgctttttagcacttaatatcttgatatgatttcattacatccagagctttttccttcttttcggggcagatgggtaatgtattcattggtccccgcatggcctcggcctgtatgcaggagcctagaatacaactttgggatgctatagggacatccctgaggtgagcctcctacaacgagcctggcacccagcaggtgctcagtaaataggaatgaaaaggctagctgtaatactagtactttgggaggattaggtgggaggtttgcttgagcccaggagtttgagactagcccgggcaacatagtgagacccccatctctaatttttaaaattataaaaaataaataccattttacaaaggcttgtatagcttatcttggagcctccccccatgggtcatgcccaacggacttagaccttgacccagaaacctcccttagaagcaatttgtattctgaaatggtgacttcacagagggcttattggataaggcccacggctgaatcactgtttgtttttaggcaagtgtgaggcataggaagaggttaaatccaggatgaggatggcagtagagcattgactcattcattgaactttctgtagacaatgtctttctcctggtcaagattaactttccaactcctgatcaattcattcactgataatgagctaatcaacaggggccaccagtctaataaagagctcttagaaattaagaagttcattcactggaaggacatgcaggattttaaaaaaggaaagaaatcaagttcatcaatttggtgaccaaaggacatgaagcaatagttcagagcacagagaaacagaaatggctttggtgtatgtaaaaaatgctccacactgccgggcgtggtggctcacggctgagtgcggtggctcatgcctgtaatcccagcactttgggaggccgaggcaggtggatcacctgaggttggcagtttgagaccagcctgaccaatatggagaaacctcagctctactaaaaatacaaaattaggtgggtgtggtggcacatgcctgtaatcccagctacatgggagggtgaggcaggagaatcacttgaacgtgggaggcggaggttgtggtgagccgagatcacaccattgcactccagcctgggcaacaacagtgaaactctgtcgcaaaaaaaaaaaaaaatgctccaccctagtcatgtgaaatgcaaatgacaacaggagatcccattttcccttatcagacaggcaaagataaaaaagttaaaggccagcaaggtggctcatgactgtaatcccagtactttgggaggccgaggcaggtgaatcacttaagccaaggagtttgagaccagcctagacaacatggcaaaacctcggctctacaaaaaaaaaaaaaaaaaaaaaaagcaaaagacaattagccagatgtgatgcctcgcacctatagtcccagctactctggaggctgaggtgggaggatcacttgagcctgggaggcggtggttgcagtgagcagggattatgccatggcactccagcctgggtgacagagtgagactgtctcaaaaaataaaaaatagacagggtcaggtgtggtggctcatgcctgtagccctgtagtcctagctgctcaggaggctgaggtaggagaatcacttgagcccaggagatggaggctgcagtgagttatgatcatgccactgcactccagcctgggcaacatagcgagaccctgtctcaaaaaagaaaaacaaaaagacaatactctgtgttgggcaacttttgaaaaggggccctcaactccctgctagtgggagtatagttcagtttcatctttttggatggcatttggacaaatgtatcaacattttatataacataccatttgatgtgaagtgcaatgatgtgtgtagagggcattcattgaaattgccacattatttgtagtagccaataaattgcaatctaacctaaatgcccatcatgagtcttcgtgttaggtaaattgtgtgattgtgctataatccatacaatgaatagtccgcatccctgcagaaaactaagggagctgcgtgtaatgatatggaatgattttcaaaacactgaatattgttatagcattacccatgtgatgacgattcaaaacaaaaaaatgttactatagcaaggtgtaggttagtgtggaggttcctatttgtaatacataaagggctgtacatatatacatatatatatatatatatatatatatatatatatatatatatagttaaagacaggatctcactctgttgcccaagctggagtgcagtggtatgatcttggctcatggacgcctctacctcccaggctcaagtgatcctcccacctcagcctcccgagtagctgggacaacaggcatgtaacctgcctattttttgttttgttttgttttgtttttttgagacagggtcttgctatattgcccgggcttgtctcaaacttctgggctcaagcgatcctcccaccttgacctcccaaagctctgggattacaggtgtgagccaccacgcactgcccatgcacatattaatatatacataggccatccctggaaggtcatacaagacactggtttaaaaaaaaaaaaaggttgctttggggagggaaaaggaggtctggaatggagggagactcttcttttagttgggtaactgtaaatcacattatttagctactggttttacttctagtgggagattggcacctgcagaaaatgcaggtgtctattcaaatgtaccttccttccagaagcctttcgtgagcacactaggtattcccagattgccctcccggcagttataccagccttcacctccctgaaaagcacgtgccccctgcaccccgcgacgattgcagggaggcgccttggccagcagagggcgccagaggaccgcgccccaggcctggggcgggaccccctcgtgcggggagctggggagggcctggccctgccgggtcccaggccacctgggccgcagatgtcgcccatttccgggaggacctgaccccacagtatcaaaagtgtcacctcaccttcccctgcaaagggagctgggtctgcggccgagaggcctggcccgaagcctcctctcacctcgtggtctccgccgcctgcaggagggagtggagcgagggcgggcctggagggggtggcggggacaattcgatccgatctgagcaaggcccctcccctctgcgttgcctcccacccccatgccccgcgcaggtgcctgaccactgaaggaaagtggaaagcgggaggcccaggcagtggctgcctgcaagtacttgattgagcccccattatgtgctttgaagaaaacagaataagacaatgagagagaaaggtgggctgggcgcggtggctcactcctgtaatcccaccaagttgggaggctaaagtgggaggatcaattgagccgcagagtttgagaccagcctgggcaacatagtgggaccccatttctacaaaaaataaattagccaggcatggtagcgcgtctcagtgaaaaaagggggaaaaaaagaaaaaagaaggtgggtgctggggcaagggtgggtcctactttggctagggtgatcagggaaggctcccctgaggaagtgacttacattttttgtgttaaatatattattcatacctaaaagtgtttaaattgtctctgtacactaccatgtcatgaagatacggtaaaataaatagtccatgtacagtagaaagactaacaataaagatccctccctgcctaggaaacagatcattaccaaaattctagaagcttcatgtgcagcctgttcttgcctcccctcctcaccagccactcttcagaattttgtatcaaacatctccttgcagccggcatagtggctcacccctgtaatcccagcactttggcaggctgagctcaggagttccaggcggcagtgagccgtgattgtgccactgcactccagcctgggtgacagagcaagaccccgtctcaaaaacaaaacaaaaaaccacttccttgcttttctttctaattctacaacccccacatacatccctaaataatatagggtttcatttgcctgcttcagaacctcgtataaatccaaataactatgcatttgtttgtgacctctgctcgacattgtgtttttgagattcatccctgttgctgcatggagttgtagttcatttttattgctgtatagtattctattacaggattgcaccagggttcattaatccagtctactgtttataaacatttgtgttgtatccagttttgttttagtttttgctttttttgctattaggaacgagggtacaatgaatatccttttttgttttttcggggtttgggctggacaacagttctttactttgcttggttgctcattataatccccaggggagttttttaaaatgctgatgccagaggccccacccagactaattaaatcaagatgtgggtgggggtggggtgggccgaggcttaggtgttttaatccttccctgtggggatctaatgtgctgccagagctgagaacccctgggatgcagttggtttgaggacagacttgtcagctgcagcccctgggatgcagttggcttgaggacagacagggagaggagtcacctgttgctagctgatgccaaacttttccaaagtgactatgcccaccgaccctctcgccagctctcacctcctcatcaactcttgatagtgaccaaatttttccttgttgtccttctgatgggcgtgaaatggcagctcactgtggcttgaatttgccatttctctcttcactaaacgaggctgagcagttagtgaagttgctgctgaaacaaagaatgaaaggaagccagcgtgaagatctaggagcaagagacgtaggggagaggaggaagagcagcaggtgccaaggtgggaaaggtctgggatgttggaggaacagaaggaaggctgggggtgggatccttgtgcatgggggagggagagaggctcaagccaatgtcagctggggtcagagcagcggggccgagttggctgaggagaggactttggcttttactctgagacaggcgcatgggagggtttgagcagaggagggggtgatctggcctcactttggcttcaagcaaaggatcctgattggagctaaattgacacgggacggggagtattccgcttaatgactgcttactgcctctgtcccccaccctactgcccgctctccagctagaaccaggggaggacgattttgttcacggctgtcacacccggcaccaagtgactaaacagacagtagttctgcccttcaggttggtggtggtggtggtgtggggtgcttataggtttttatagtcttccttcacaggtggaaacaagaacggtgagacctgtgaggtttatttcagagccacccccgggcctggtacgcctcccagggaagctggggtgggggtgcagctgcccctcacttgggcccaccccacatgcattcagtcagggcccctatggagccgtgttacagcctttagacacaggatcgaggatcttcacggggtgaggagacacgcccggcccatgccttctttctcccgccagcctacagggatctttttcaacgaaactctaaccaggtccctcctcagctgaaaatccttcggtggctccccagtgcccttgaggcaaagtccaaactcctacgaggccctggggcccagcacatctgacccctccgggcatgcccatcccaccccatccctggaagctgctctctaggagttactctgaagcagttgccacttcttccctcgggccttttcccttgataattcttcacttcctctgggaagtcaccccgaccccctgtcaggtgacccgcctcttaacggtcgccgcgtcccgtctctcccccaccaaagcacacttccctttgcattgtaattatctgtttacttcgtctgtctccctcactggaccagaagctacccttcgggagaggctctgagtgttctgtccggggctgtgccctggccccaggtacagtgccccacacgtgctgggcgctccgtaaacactggataagggaaggaacgggtgctcttggctagctgggccaggctgctttgcaaaaaggccgtggcatttcaagccgccgagagccacgtgcggtgtccctttcctcgcttcctccccagtgatgtgcgtttccctcgtcaatgccacgctctccaggcgccagccgggcggaggaaatttccgccccctcccaagcccgaggcgggggcgggcgtcggaaggtcaggtgtcccggccggcgcgcagcgccagggggcgtcagaagcgctcagaccaccgggcgctgagccggtgggcgcgcggcgtcctgccggggtcccacctcgcagaggcctcgcttcgctcgacgtcccgccccggacagccccagcaccggggacgacccgcgctgcgccagcgaaccccgcctcggaggagtccccgcccgggctctcaccgccacgcggcgcgagcccggccagcagccggcgcacctgctcggggagtggccttcggcggagacgagcctccgattggcgcggaggtgacaaaggggcgtggcagataaggccccgcccctcccaccccccaccacccccccggagtacttaagggagttggcggcgctgctgcattcattgcgccgcggcacggcctagcgagtggttcttctgcgctactgctgcgcgaatcggcgaccccagtgcctcgaccactatgccgcgctctttcctcgtcaggaagccctccgaccccaatcggaagcctaactacagcgagctgcaggactctaatccaggtgcgttggaggggttctgggctccaggaggtttgggggagacaggcgaaggctgcgtggggggcacctgagggaggcggcctgcctgagccaggatcgagtcacaggatgttttgtggaccattgcgggctcgggagaccgggcaagtgggtccccagttccggggatctgtctgggtggttgggggagtgccgtgtagagggcaggggtcttcagcttggggggcctttgtagccggcgagaggcggaggagctccgcaagaggggaaggagaggaggcctgtgtcaggagggccctctggacgctgctggggagagtccggagtccagagggttgaggggaggggtggggagacgagatgtgtgtgaggagggggattggggcagggtggtggctccggggctgggatgatggggttctggcctcaggctggagactggggacttaggagagggagatcaggaaatgacctccttcaactgggggtcctacgtgtgagagactcagattgggtgacctgggcgaggagggcaggaacctggtctgtcctgtggataatttttttgatctaattatgtattgagaatcggccccacccagcccctggccagcggtgggctcatgtttgttgattgagtgaatgatttaattaacgcctgactctgctttttctccctcagagtttaccttccagcagccctacgaccaggcccacctgctggcagccatcccacctccggagatcctcaaccccaccgcctcgctgccaatgctcatctgggactctgtcctggcgccccaagcccagccaattgcctgggcctcccttcggctccaggagagtcccagggtggcagagctgacctccctgtcagatgaggacagtgggaaaggctcccagccccccagcccaccctcaccggctccttcgtccttctcctctacttcagtctcttccttggaggccgaggcctatgctgccttcccaggcttgggccaagtgcccaagcagctggcccagctctctgaggccaaggatctccaggctcgaaaggccttcaactgcaaatactgcaacaaggaatacctcagcctgggtgccctcaagatgcacatccgaagccacacgctgccctgcgtctgcggaacctgcgggaaggccttctctaggccctggctgctacaaggccatgtccggacccacactggtacgtgcccctccaggcgcccccaccgttgctctctctggcagcttttgtgaatctgggcttgctgttctcattcccaaagctgtggacactgaggccccgagtcttctaacttctagctcaagttccagggcctggctctctggaaacgtttggcagaaactttcttcatcagctaagcagatgggcaaagcagacaccttcccaatcccctgcagcctgtttctcagccaaatgggtcggagctggatatgggaaaggtgcaaccaacaccttgctgtgggggccaggtgtgaaggggcccacccggccacaccctctcccgggtccgccccctccctagccagacaggatgttgtcagaccccccgcctggctctgaatccttctttgagaactttctcaaaacttaggctgatgtttctcttctgtgagcctcattttctctatctttcagatgggcatgagaacagcttttggggtttctatacaggctaaatgcaggaatgcatatgggaagcacctggcaaagtgccggtacctgctaaactctcacaaaaatggttccttggcatttgctctgcttccttgctgtgtgactttgggcaagcaacttaacctctctgagccttaggggaaaactatgatagcatatgttttagagagtggctgtaaaggtggctaatcactttatagtaatttattatacccgaacggttctcaggtcggcttccccacccccactgaatcctagcacacagaccaggaaacggcatctttggggcagaaaacacaatcacgtcttttgaaaatttactaaatgtgtaaaaaactttctggacatggagaaaaggtagaactttttagaacttgaatggtggcagccactgtgcctggagctgctctttggagagtgacagttgagggagaagattccacagggttcaagctggccaggttctgccatttcctggcctggcgcctgacctctgagcggtgagggttagtgaggtgtctgggaggactggcaattcgcgggctttattggcatcttattcgactaaggctacccatttctcttccttcgtgcaccaattgctctgattttaacatgtaaaggtccaactgcctggcctcctgggtgcctgcccagctcacagggctctattttgggacagttgaacccctcagggtgctgcagtcctgcctgcctctctcacctcccatctggacattattttaatgtaaaggcatggctgagacacagaaatccccttgaaatgtatcattgcggtcctcattgactcccattgtgtgccttaatggtgggcccagtgggtgggggctgggaggggtggagcaggtgcatggggcagcggtgcccagcacctgttccagtcacagctgctggcccactgcatggcaggcccctttaatccggggatatcgcatgtacagtgcccccctcggcgccctttgtccccgccggcctggtgccgatttcacacttgccaggagtaccatgaaggcgtctggggggcgagggatccaaggagtgggggtctgtgcctcctgcgtgtgcacacagcccccgcccccagcccatcatgtcctagaatgtctccttccccttttgtttgggttcaggtctcatcacactttgggcacttactgtacaggagggtagtgctcaggacttcaccaacagccctgggaagggaagggaggtgctgtcctaactctggtcttacaaatggactccagccccttttccagatctccagagtcagcccttagttcacaagggtgaacttacccttctcattcacatgaagacttagaatgcaatcaacaaacccttcaggcgtggcgtgtggaggctgctgagtaatggcagagtggagtagtgctcaggcacccctcccccaatcctctatgtcccccaccctttggagtggcgagtttccatttctgccccatgagactgagtccagctctcaggcgctccataagtccctattgaatgcatgggtcccattggagccatcctctggactctctcctaccctggtagctcagtgtggcaccctaggcacccaggaggtgatggaatgaattcactctcagctcttaaattccatccagcgctgggatttcacaggcgggccctgaccttgcgggcatatcagactgggcgtgaggggattggagaattgcatgttttttaaaaagactattcagtattatggaatagtgtctagcacttagtaggagctcagtagattaaaaaaaaaattatagacagggtcttgctttatcgcctaggcttgtctcaaactcctggcttcaagcaatcctgcctcactcggcctcccagagtgatgggattacaagcgtgagccaccacacccagcctcaatagatttttgtttaatgggttactgttatgaccttttatttggaaaatgctgcatcccccagaaaaaaacaaatcaacattattggtgtttttggaactatatagctttttggttggagcagggattgttatgaggcatgagtgagggggcagactcctctgaggcctctttaatttttaaaacagacttatttattctctaagggcttgttgaggatttactgggcacccagctccatgtgcaagacttttcccaacacagccttggccaggcagatggtgtgtcagggccacaggtttccgtagcctcttgggtgatagaaaggggcccaggccctgggctggggctcagaagggactcaaaggaggcccttgcccttatgggactcagcctgattggagaacagacaaggagatttgggattacagcgcaggaggtggggtggtgaggaaagcaggctgctggccgggccccaggagtggcctaaccagcttggaggtgggggtggggaagcctcttaaggctgactctggctttggcccccaacagagtaaatcaaggaatgactccaggactgatggtaaggacaccagtcacgtcctcccttgactgaaggcagtaagggcagtaggtgaaatcagaggctttggggtcctgccaggggaacctgaacatgctacttctgggcctcagtttcactgtctctgaaatgagaccacagtaggatcaagtgacagtaggatgaatcagtaaaggtgttgagtcattgttgaccacttcgcacgtccctgcgggatgtggatgagtaccctaccttctgtcacttatcaacccctatgagtggggggtgaatagccccattttacaggtgggaaaatggaggctcagagaagccagacaacttgctcagagttgcacagtgggaagcagcagagctccgtcaggtcccggcctttggaccctggctgtgtgtttgacggaggcctggctttcctgggatcatgggattctttcagggtttggggtatgcggggagggattcccatcactgccagccgttgtcccacggctcactcggcctttctggcgttctctccccaggcgagaagcccttctcctgtccccactgcagccgtgccttcgctgaccgctccaacctgcgggcccacctccagacccactcagatgtcaagaagtaccagtgccaggcgtgtgctcggaccttctcccgaatgtccctgctccacaagcaccaagagtccggctgctcaggatgtccccgctgaccctcgaggctccctcttcctctccatacctgcccctgcctgacagccttccccagctccagcaggaaggaccccacatccttctcactgccatggaattccctcctgagtgccccacttctggccacatcagccccacaggactttgatgaagaccattttctggttctgtgtcctctgcctgggctctggaagaggccttcccatggccatttctgtggagggagggcagctggcccccagccctgggggattcctgagctggcctgtctgcgtgggtttttgtatccagagctgtttggatacagctgctttgagctacaggacaaaggctgacagactcactgggaagctcccaccccactcaggggaccccactcccctcacacacacccccccacaaggaaccctcaggccaccctccacgaggtgtgactaactatgcaataatccacccccaggtgcagccccagggcctgcggaggcggtggcagactagagtctgagatgccccgagcccaggcagctatttcagcctcctgtttggtggggtggcacctgtttcccgggcaatttaacaatgtctgaaaagggactgtgagtaatggctgtcacttgtcgggggcccaagtggggtgctctggtctgaccgatgtgtctcccagaactattctgggggcccgacaggtgggcctgggaggaagatgtttacatttttaaaggtacactggtatttatatttcaaacattttgtatcaaggaaacgttttgtatagttatatgtacagtttattgatattcaataaagcagttaatttatatattaaaaagtctttggtgtcatagaggagtgggtattttgaaaggtctttggtaagggaggaggggacaggaattcctgaagcttagatatttctgacacagccttaaatcttgtccttggaaacatcatagggctttggagtcctgggtgtcactgtcagggaccttatgagactgggttttcccgttggcctgggtgtcctgtctgctgctgtttgggtgagccagcggcatccatacgagctcttcactatacactgtggctttttactttctcgttcttgaattttgaagttgatctggcccacggagtgcaaagctggcttcctgggtcttatcaactagacaggctgcaaagctctgccccagcactgcaggtcttttggggtgggattgtccgcttcccccagatgcgagtggaatgcgaccaaggagacagaggatgtccttcctgtttccaagggctccaggcccccttgggcctccttgtcagtcccacacctccgtcttgctgctgggtaccaaatggcctttgatgcgaggaaattggctggctggagccagtagggtgagaagccaggccaaagggtaggggtcactcagcttcctgctccgaggacggcgggacggtcagcatgcgtcttgggctagggtaattcattccccgccagccgatggtggtgacctcaccactgggggcctcttggggccaggagaaaatgagtgtcctttttgaacacaaaaggtgctggaggtgccagtttcctgtgaggagctgaggcgtcccagagcttcggagccccagagtcaggctgggggtggggggagcttcatgttccaaaggagagatgattctttcttctaaacaggaaatggtgacccgcaggccgggagcagcccttaatgacttgcagctttcctcccaaaaggaaaaaaaaaaacgttctctaacaatcgccaaattgtggcctgcctccctgaagggaagttagggagttggggggatgggggttgggcatccatgagctgaaggcctactgtgtcctgggtccctgcgggtccctctaggtcgtctccatccacccacagtaggtgctgaatgaatgatttcatgacttcacataatccctgggggtcgggcctccggaaaatgaggcacagaggtgggcttgcctgaggtcaccaagcccggcccctcaggtcatcctgggagttcggtaggctgggctcatgccgctgactctcagggcacctggagcaaggctctctccctctgggggccccagtttctgtgtctataaaacagggtgacagtagtgccttcctctcggagactgtacagaggcattcattcattcaggggtttcgagggtaccatatgtgccaggccctggggttacacccgtgaacaagacaggccatccctgcgttcatgggacgtatgttctggtcggggagagagaaagcaaacaagtgattaaataaacaagccgcttttctacagtgatggtgccaggacagaatgaaagggtgccaggcactagagaacaacggggtggggctccccaggccaaggcagtgagagccctggaagagctgaattccagcccggacctgaaggaggagaaagatgccggcagggaaggatctgggggagggaatagcaagcctgctggaatgtgctgcccccatgagaaagaccaggatggcggagggactgggaagacagggtgggagaggagagtgggcccagctctgcagagcttgtggtgctaagcaggtgggaattttgtctaagcccctagggcagccactggggctgtaaagcaggagagtgctgaggcctgctgttacctttcctacaaagatctccctggctgcttgggagaatggatctcaggggtccaggaggagaaagacaaaggcagggagaccatgagaaagccagagggggccaggcaccctggctcatgcctgtaatcccagcaatttgggaggcttagacaggcagatcacctgaggctaggagttcgacaccagcctggctaacatggcaaaaccccgtctctactaaaataaaaaattacccgggcatggtggggcatatgcctgtagtcccagctacttgggaagctgaggcaggagaatcgcttgaggtcgggagctgagatctcgccactgcactccagcctgggtcacagaacgagaccttgtctcaaacaaacaaacaaacaaaaaagggccagaggggagggagggaaggaaaggagggaggatggtggcctggctcagggtgttggtggccttggagatgaagcctgtatttaagaaacttgtggcagttgtggccacccagcccatggcccagcacacctgagccctagtgggtgacagttatttagtattattatctggggaactgggcatggtggttcacatctgtgtagtcctagctatttagaggctgaagtgtgagggttgctggagcccaggagtccaaggccagcctggacaacacatcgagacattgtctctacaaaaaaatttaaaaattggccgggcgaggtggctcacgcctgtaatcccagcactttgggaggccaaggtggggcagatcacttgaggccaggagttcgagaccagcctggccaacatggtgaaaccccgtctctactaaaaatacaaaaattagctgggtgtggtgtcatatgcctgtaatcccagctacttgagaggctgagcacgagaatcccttgaacttgggaggcagaggttgcagtaagccgaggtcgtgccactgcactccagcctgggctacagagtgacactctgtctcaaaaaaaaaaaaaaaaaaaaaaaaaaaaaagtccgggcttggtggagcacaccaccaaggggatgttggatctagtgggggtagatactatgaagctgagaaaagaatggggaaagcctctatattctgatcctgagcaaaccccaaagcactaagtgaaaaagaaatcaccggcagatgtgctcccttctgtgggcagaagagggatgaaaatcatcaacacgtgattcattcttgtttgtatttgcatacggagactctggaggttaggacaatatactaacaaaagtggttccctggtgggttgcaggaggtgggattggggtggacaaggactggagggagggaagaagggagccattttttaaagatttttaagacgttttactttgaaataattgcagcctgacagaaattgcaagaaacagtaaactggaatcgtacattcagattcttcaatacgttaacgttttatcatggatacatcttccctctcttcctagacatacacacacattatttagttctgaaccatttgaattttttttttttttcagatggagtctcgctgtgtcacccaggctgggatgcaatggcgtgatctcggctcactgcgacatctgcctcctgggttgaagcgattcttgtgcctcagcctccccagtggctggaattacaggcatgtgccaccatgctcggctaatttttgtatttttagtagagacggggtttcaccatattggccaggctggtctcgaacttatggcctcaagtgatctgcccgcctcagcctcccaaagtgccgggattacaggtgtgagccacggcgcccggcctgaaccatatgagagtaagttatagacacagtgcccctttactgctaaatatttaagctatgtgtcctaaggataaggacattctcccatagtttcatgatcaaaattaggaaatttaacattggtgcaatgctactctgtaatccatagtcataatcacatttctgcaagtgccccaatgatgtctttcacagcattttggggggtgtagctggtggggaatgaccaggatgcaatgcaaggatcacacactgcattcacttgtcctcactcttttatttatttatttaaaattttttttctaacagagacaaggtctcactctgttgcccaggctggtctcgaactcttgtgggttcaagcaatctgcccgcctcagcctcccaaagtgctgggattacagacatgcccagctacttgtcctgactctttttttttttttttttttttttttttgagacagagtttctctcttgttgcccaggctggagtgcaatggcatgatctcggctcactgcaccctccacctcccgggttcaagtgattctcctgcctcagcctcctgagtagctgggattacaggcatgagccaccacgcccggctaattttgtatttttagtagagatggggtttctccatgttagtcaggctggtctcgaactcccaacctcaggtgatccacccgcctcggcctcccaaagtgctgggattaacaggcgtgagccaccgctcacttaatctcttttttcccaaggcagctcctcagcctttctttgtctttcacaacattgacgttttttgaagagtacaggccagttgttttgttgaatgccctccagtttttttcctgatgtttcctcataattacatttgggatacgcactttgggcagaaccacagaagcagcatgtgtcttgtttggtgcaaggtgtcatgaagcacatgaggtcggctcatcccagactgacatcaactttgactgcttggttaaggtggggcccactaggtccctccttgctgaagttcctctttttccctttgcgctcaatctgtatcttgtgaagagatacttgaagaccatgtgatgcctccgagtatctcctcacaagatacggaaaggaccatgtgatcctatgatgcctcaaacttccatccacaagtttcatccctttcaggttctttttgcctaaatcaattacattttacgatggtagttaccaaatgatgatttcctttctttttttttttttttttttgagacagagtcttgctctgtcgcccaggctggagtgcagtggcacgatcttggctcactgcaagctctgcctcctgggttcacgccattctcctgcctcagcctcccgagtagctgggaccacaggcaccctccaccacacccagctaattttttgtagttttagtagagacggggtttcaccgtgttagccaagatggtctcgatctcctgaccttgggatccgcccgcctcggcctcccaaagtgctgggattacaggcgtgtgccactgcgcccggcccaaacggtgattttctaaccccatcattccttctactttactggctggctttctcctgcaggacttcccctctgtcggggcagcggcttagagctgtgggttgggagaaatggggccaggagcagcaggatctggccaggccattagatcctccccggggattttctttaaaacgagtccaggaaataaactggctataaagccagtctccatgcaagtgtcaaggcaggcaggtctggggccaaggccatctctgggcacatctgggctgcattagtgacctgttggctacttatgggtatcctctgagctgggatgagggtctcctggtagacagggatcaggactgtccttgttcttctttgctttcaaactgtttatttttttcgtttttccttttttttttttttttttttgagacagagtgtcacccaggctggagtgcagtggctcaatctcggctcactacaggctcaacctcctgggctcaagagattctcccagctcagcctcctgagtagctgtgactaaacacacacaccatcatacctgcctaatttttgtgttttttgcagagatgtagtttcgtcatgctgcccaggctggtcttgaactcctggactcaacctatcctcccacctcagcttcccaaagtgccgggattacagtcatgagccgctacacctgcccaaattgtcagtttcataaatatcacaggaacgtattccctcctttaaaagagtgagaaggtgacatgtgaagctccagtggcatgtgatcaacactctctatccttatgcctttactgtccccagcatgacgccatggagatcttggtttacatctttgtcagttaaaaaaattagcaactggccgggcgtggtggctcacgcctataatcccagcactttgggaggccgaggtgggtggatcatgaggtcaggggttcgagaccagcctgaccaacatggtgaaacctgatctctactaaaaatacaaaaaaattagctgggcatggtggcgggtgcctgtaatcccagctactcaggaggctgaggcaggagaatagcttgaacccaggaggcggaggttgcagtgagccgagattgtgccactgcgctccagcctgggcaacagagcaagactctgtctccaaaaaaaaaaaaaaaaaagcaactatatttcttttctttctctctctctgtctcttttttttttttttttttttttttgacagagtctcactctgttgcccaggctggagtgcagtggcatgatctgatctcagctcactgcaacctctgcctcctgggttcaagtgattctcctgcctcagcctccaagtagctgggattacaggcgcccaccaccatgccccactaatttttgtatttttagtagagacggagtttcaccatgttggcaaggctggtcttgaactcctgacctcaggtgatccacctgcctcagcctcacaaagtgctgggattatagatgtgagccactgcacccagcaaaaaaaaaatgagcaaatatatttccatgcatacatggctccgtctcacttacctggttccacaagggcctccaccacctctgcctcatccctttccccgcccccctcactccttccagccacaccaggctccctgccccctcagggcctttgcactgccactccttctgccaggagcactaccctagagagccacatggccactcacctcccatccctctccctttcattccaacccctttccctgttattttctccatctgacaaaacactcatttccctgttcagagtttctctgttgactgtcttcccccaccagaatgtcagctccatgcaggtggaattttttttttttttttttttgagatggagtttcgctcttattgcccaggctggagtgcaatggcacgatctcagctcaccacaacctccgcctccagggttcaagcaatgctcccgcctcagcctcccaagtagctgagattacaggtgcacaccaccacgcatggctaatttttgtatttttagtagagacggggtttcaccatgttggttaggctggtcttgaactcctgacctcatgatccgcccgcctcggcctcccaaagtgctgggattacaggcatgagccaccatgcccagccatgcaggtggaaattttgtcttcttcattcactgtgcagtgatccctggagtccctttcacatgtgggaggcacacgctccgggaaacattgctgaaggaatgatgagtgagttgatatgtgcctgtcagaaacaccgtgtggtcaccatttttttttttttttttttttgagatgaaatctccctctgttgcctaggctggagtgcagtagtgtgatctcagctcactgcaacctccgtctaccgggttcaagcaattctcctgcctcagcctgccgagtagctgggattacaggcgcctgccatcatgccttttgttgttgttgtcgtctttttagtagagatggggtttcaccatgttggccacggtgacctcgaactcctgacctcaggtaatccacctgcctcagcctcccaaagtgctgggattacaggcgtgagccactgcgcccagcatttttttttttttttttttgaggcagagtctcactgtcacccaggctggagtgcagtggctcgatctcagctcagtgcaacctctgcctcctgggtccaaatgattctcatgtctcagcctcccaagtagctggcattacaggtgtgtgtcaccaagcccagctaattttttttgtatttttagtaggacggagtttcaccatgctggccaggctggtctcgagctcctggcctcaagtgatccgcccacctcagccttccaaagtgctgggattacaggcatgagccactgcgcctggcccattttgaatttttgtttttgagtttgtttggttagacttccttctgctgtgaaacccacagttgggtgatatattagtttcctagggctgcccccaccaaattcccatgaacttggtgggaagagcagaagtttattccttcatggtcccagaggccagaagcaggacatcaaggcatccacagggctgtgtttcctccacagactgtagggtagactccttccttgtctcttctctgtgtctttgtttctctttttttttttttcaagatggagtctcactctctcgcccaggctgctcactgcaacctctgcctcctacttcaagcgattctcctgcctcagcctacagagcagctgggattacaggcatgtgccaccacacccggctaatttttgtatttttagtagagagagggtttcaccatgttggccaggccggtcttgaactcctgacctcaggtgatctgtccgcctcggcctcccaaagtgctgggattacaggcgtgagccactgcgactggttagccgtctctgtttctcttaagacaccagtcattggatgtaggggccaccctaatccaggattatctaatctttacttgattgcatccacaaagatgctatttccagataaggtcacattcccaagtcctgggaattgacttgaacatatctctgggttctacaattcaaccccaggtgtactggtggctacaaccaaaggcttggcaaggctttctcagggtctggaatgaatccaggtgcacttatctgtttatttatttggaggtcggtggggggggggggttctcacgctgtcacccaggtggaagtgcagtggtgcaatcacagctcactgtagccttaagcagatccaggaagtttttattattcactcaccaaaccctgcaggagggtcaggaaggtggcctggaggaggggacccttaggaggagacttgggaggtgagtaggattttgcctctgtggctccaggaagagagagagagccctaggtcaaagctccaccaagccctgactgcagaggttactgcatgagcaggtaccccagggttgggtgacagccacagagggagaggtcggcttgcatcagggccaggccatgcgggcctcggagtggggaactacagatttatcctgagggcaatggggagccatgggaggggctggcagggaggggactgagtgggtttactctttggaaagatccctggggccactgtgatgggagcaggtctggcagcaggaagagcagttgaggaggtggccacggccccgtgatggtggcagatgaggcaggggtgctgtttggcgacacatgaatgagcagactgagggaggagacaaggatgatgccgggacaggatttttcgccaagtgagggaaataaggacccagggaggcaaagagcaaacactcaggcaaataataatgacgatgatggtaacagaaacacttcattccagttcactacctgttttgcacggattatttaatttaatcatcacaacagcctgaggcaatgtgggtataagagaaggtcctatagagtttaggggctctagagtcaaacttcctgggttcagtctctgctccattgcctacctcctgtgtgacctagagcaagttgttcaacctctctgagtgtccattttcttatctgacaagcagcctctccttcctggggttgttgtacagattcagtgagtaaatccttgtaaattggccggcacggtggctcacgcctgtaatcccggcattttgggaggccgaggtgggcggattacctgaggtagggagttcaagaccaacctgaccaaaatgaaggaaccccatctctactaaaaatacaaaattagctgggcgtggtggcacatgcctgtaatctcagctgttcaggaggctgaggcaggagaatcgcttgaacccaggaggcggtggttgcggtgagctgagatcgtgccattgcactctagcctgggcaacaagagagaaactctgtctcaaaaaaaaaaaaaaaagaaaaaaagaaaaaaaaaacttgtaaattgcttgccctcgggcctggaagagtaagctttagtaaacagtggctgtaactatgcccattttacggatatgaagaaagggagagtagcgaagctttccaagttcatctagaggataatcctacggtttcaggcactctgcgtctcttaccaaagtctggggacctgagctggcctgcagatcccagggtctggcatcctgtttcatcccctggaatcctgagtgccagggctgggcagcccagacctggaggagccgggacacttgccgtgcacacttcctctctgggtacaacctggaaggtcctcaggctaggggacgcagggcaccaaactcaattctatttagctggagctatggcctgaaataaaagcttaaatggggctgaaaaggtagcagcaaggagaaatgaaacccatgtgtcactcatgggggccctcgggacggggatccctcagagaaactcatctttaccccagggaaagacccagcgctgggcacggggctttcccaaggctgtcaatcttctgcttgcagttacaaatgccaccaatgtctcactttgtgacccaggatgagtccttgccttctccagcttcactttgcaggtcaccaaaatgtgcttaacttttgacccaataataaaataaaaagcactttaacacacacattttacccagcacgtttcagtagagcaaacaccatcaacaatctacatgcccagcacaagtggattgtatatgttacctggagtcctggtgtgttctgaaaactttgcaattatagatgattatacaatccctaaaatatacatggtatgtatatttttctctattttttttttttttttttttttggagacagggtcttgcgctgtcatgcaggacggagtgcaatggtgagatctcggctcaccgcaaccttgacctctcgggctcaagtgaccttcccatctcagcctccttagtagctgcgactacaggtgcatgccaccacgcctcactaatttttgcattattattattattttttttttgtagagacggggtcttgccacattgcccaggctggtctcaaactcctgagctcaagtgatcctcccacctcagcctcccaaagtgctgggattacaggcataagccaccatgcccggcccattatatgtatctcatatgaacagagaaagaataagcctggcacatgattagcagcccaaaatgcttttttttcttcttctcgagatggagtctctctctgtcacccaggctggagtgcaatggcgcaatcttggctcactgcaatctccacctcccaggttcaagcaattctcctgcctcagcttcccgagtagctgggattacaagcatgcaccaccacatccagctaatttttaggttttgtttttttgtttgtttgttttttgagctggaatcttgctctgttgcccaggctagagtgcaatggtacagtctgacctcaccacaaccttcacctccggggttcaagcgattctcctgcctcagcctccccagtagctgggactacaggcacacgccaccacgcctgggtaatttttgtatttttagtagagatggggtttcactatgttggccaggctggcctcgaactcctgacctcgtgatccacctgccttggtttcccaaagtgctgggattgcaggcatgagccacagtgcccggccccaaaatgtttcttgaacaattaaatgaatgaacgaataagcggtcagtactcagtgaatatttgttgacagaaaggaaaggagaaaaagaaaggaaaaaaggaaggatctggaaggtttgtacccacagtcacagtgattttctgggagaggaggctgaggcaatggcgaggaggagggcatttcctgttaggtaatgtttaacctcttctgcgtctgtattatgatagcttcccctaagggagcatcttttagttcacaagcaagcagtcaatagtcccacggacaaactcgattgtcacacattgccttgagaaggtgctgacaggcagaaaaagcagtttgccaagcagcctgaaaaaatgatatggccccatttcttttcttttctttttttttttttttttgagagagtctcactccgtcacccaggctggagtgcagtggcacgatctcagctcactgcaacctccgccttctgggttcaagcaattctcccaccttagcctcccaagtagctggacctacaggtgcatgccactacacctggctaatgtttggtagagatgaggtttcaccatggtgctcagctggtcttgaactcctgagctcaggcgatccacatacctcagcttcccaaagtgtgggattgcaggcgtgagccactgcgcttggccaaggccccatttctgtaaaattttacctctagctttacccatccttgccttcacacagagggaagcgcctgtctgccctgggggtcaacagtggttctgtctggatagtggggtggctggggttaagttttcttttttataggtctctgaatttctgtaatgagcatgcaccaggcatgggttttgggtttttacaggctcacacctttaactccagcactttgggaggctcaggcaggaggatcccttaaggctaggagttcaaggccagcctgggcaacataatgggaccccacctctacaaaaagtagtaacagtaaggagtatgtatttttctttttaaacagaaacacacacacacaggaaaaacatgcaacacttggcaatgttccgggacctagggggtctggcactctgcagtcatggccaccctgtcaatcttgagggccatagagtgacatttgggtgccctgtggtgcccaccctgagcactgccagtgaactgaatccatcctccacctcagtatctatggacagctcattcttcaactctggggggccgatattcaccaagaccacgaatattcacccagaccacgaatcttcaccaagaccacaaatcttcaccttgcaggtgctcactgctgtgactcaatcattccagggaatgagctgcatggggtgacagccccttcgagagagtcagggactgagctcagaaaagacaaaggacttgtccaagaatgcacagccattaggtaagtggtggcaccaggtttttttttttctttctttttttttttttcttgagatggagtttcgctcttgtcgcccaggctggagtacagtggcgcgatcttggctcaccacaacctccgcctcctgggtgcaagtgattctcctgcctcagcctctcgagtagctaggattataggcatgcgccatcacgcctggctaatttttgtatttttagtagagacagggtttctcaggccgggtgcagtggctcacacctgtaatcccagcactttgggaggctgagacaggaggatcacgtgaggtcgggagtttgagaccagcctgaccaacatggaaaaccctgtctctactaaaaatacaaaattacccaggcgtggtggcgcatgcctgtaatcccagctacttgggaggctgaggcagaatagcttgaacccaggaggcagaggttgtggtgagctgagatcgcgccattgcactctagcctgggcaacaagagagagactctgtctcgaaaataataacaataataataaaaagagacagggtttctccatgttggtcaggttggtctcgaactcctgacctcaggtgacctgtccgcctcggcctcccaaagtgctgggattacaggcgtgagccactgcgcctggctggtacctggattttttttttttttttttgaaatagagtctcactctgtcacccaggatgaagtgcagtggtgcgatctctgctcactgcaacctccacctcccgggttcaagtgattctcctgcctcagcctcccaagtagctgggactacaggcaagtaccactacgaccggttaattttttttttttttgtatttttaatagagacggagtttcaccgtgttagccaggctggtctcaatcgcctgacctcatgatccacccacctcggcctcccaaagtgctgggattttaagcatgagccaccacacccggccctgcaccaggattttaaaaaatggctgtattgagatataactcacatgccacacaattgatctacttaaaggctacatccacttaaaggatattcagcaggctttagtatcttcacgaggttgtgcaaccatcatccctatctaattctagaacattgcatcacctgaagaggaaaccccatagccatgagcagtcactccccatttcctcctcctctcagctcctggcaacaactaatcagctttctgtctctatggctttgcctatcctagacatttcatagaaatggcatcatagtaatggatcatacaagtcatcacgtggtctttagtgtctggcttctctcacgtagcataatgtttttgaggttcatccatgttgcagtgcataacagaacttcattatttttgtgtctggatgaatacagcacattctatttgttcattcatcaactgacggacatttgggttcataaatggaaacactttggggctattatgaagaatgcagctgtgaacattcctgtccaggtttgtgtgtggactacgagcaacatttgagagagctgaagttgttctgcatccttgtcagcacttgtcattatcagttttatttatttatttatttatttatttgagatgaaatctgactctttcactcaggctggagtgcaatggtgtgacctcggctgactacaacgtctgtctcctgggttcaagcgattctcccacctcagcctcccaagtggctgggattacaggcacgtgccaccactcctggctaatttttgtatttttagtagagacggggtttcgccatgttggccaagctggtctcaaactcctgacctcaggcgatccacccacctcggcctcccaaagtgctgggattacaggcatgagacaccccacccagcccagttttaatgttttgttttgtttttgttttttggggacgaggtctcactctgtcacccaggctgaagtgcagtggcatgatcatagctcactgcagactcgacctcctgggctcaaatgatcctcccacctcatcctcctgagtagctgggaccacaggtgtgcaccaccatgcctgggtaattttttaattttttgtaaagatgagggtcttgctatgctgcccaggctggtttcaatcccctgggctcaagtgagcctcccacctcagcctcccaaagtgctgggattacagggatgagtcatcacacccggcctgtttttatcttttattttagccattttagtagctgtgtgtgcgtaacagttttcgcaagatgtaattgacaaatagtaaagtgccatatataaagtacaaaatttgataactttttctttctcttgggaaataaaggagtggcatttctgggtcacgtagtaactctctttaggcaccaaaatttgaatgggatctgtcctgtggcagggctagggtcacttctgctggcagagtccaccgccttgggaaggagaagctgagccctggctctcatcccgactcttttctctgggaagggggcaagtctgcagaaggttcaaggatccagctctgagcccctgcaatcatagctcagtccttcctgcattcaccacatgtgcactcagtcctaaggtcaccaggccaggagtaacacaacagggaacagacaagtccctgttctcaggatgctgacaactcaccttggcttgagaaggacacagccttgggccaggcgcagtggctcacacctgtaatgccagcattttgagaggccaaggcgggtggatcatgaggtcaggggatcaagaccagcctggccaacatggtgaaaccctgtctctactaaaaatagaaaaattagccaggcgtagtggcgtgtgcctgtagtcccagctactcgggaggctgaggcaggagaatcgcttgaacccgggaggcagaggttgcagtgagccgagatcaggccactgtactccagcctgggtgacagagcgagactctgtcttaaaaaaatatatattgtgctgtttgagaaggatacagtctgtctggggtcctggctgaggcaaagcaactggttctggagcccaggaataggttcttcctgcagccctccagagaagcacagagctgttactatcatacccccattcagacagatgaggaggcccaagtcccagaggaaggagggatttgcccaaggtcattccaggtgataatggctgagcagggattcgaacccatttctcagggaagggagtgatgttgcctgggaagagtgcagggtgctatgggagagccacggggggcacgagcttagtcagggacttggggatattaggcggagccttcccagagatggaagaagtaggagttacccaggcaaagataactggaagagggggaggaagttgcaggcagagagcatgacaagtgccaaggccctggggtggggaaatgtttggggtattgaagaaatggcaagaggtcagtgtggctgggggagagaggtaggaggaaggcgggcaggggctggcatcccctaggcctcataggccacagccaaaggccaggcatttggattttattctaagctgtgggaagccaccaggggattttatgcggaggagtgacttccctctggctgcgtgtgggaaataggctgtggggactgaaggaagtgggaggccggggaggaggcacctgcagcttgtggctttccctggcaggtcagagaggaagaaggggtgggagctgtctttgtggatgggctgggtggggttggagagtgagtgaatgcaaggaccaggctggaggagggttgcagccctcatgaaagggtggggggatggtggcaccaagactgggtgcccaggggaagagacagggaggaaaacgtagaaatgcatttttcttctttttttttttttgagacggagtctcgctctgtagcccaggctggagtgcaatggcacgatcacagctcactgcaacctctgcctcctgggttcaagtgactctcctgcctcagcctccagagtagccgagattacaggcgcccgccaccttgaccagctaatttttgtattttagtagagacaaggtttcaccatgttggccaggctggtctcgaacttctgacctcaggtgatccacccacctcagcctctcaaagtggtgggattacaggcgtgagtcactgcgtccagctgcatttcttttttttttttcttttttttgagacagagtttcgctctgttgcccaggctggagtgcagtgacacaatctcagctgagtgcaacctctacctcccgggttcaggcgattctcctgactcagcctcccaagtagctgggatgacagatgtgccccaccctacccagctaatttttatatttttggtagagacaggggctggtcttgaactccttacctcaagtgatccacccaccttggcctcccaaagtgctgggattacaggtgtgagccactgtgtccagcaaaggctttttagaaaaataaaaacataaaggcccaagggacaagaaagaattcctctaagtacagggtcttccacaatctatctatctatctatctatctatctatctatctatctatctattttttttttttttttttagaaatgggatcttaccctgttatccaggctggagtacagtggcacaatcatggctcactgcagcctcaaacttctgggcttaagctatcttcctgcctcagcctcctgagactacaggcatgtgccaccacccctggctaattttttaaaattgtattttagagatggggtctttgtatgttgcccaggctggtcttgaactcctagactcaagtgatcctcccacctcagcctcccaagtagctgggattataggccccagccactgtgcctggctcagagtatttttaagcataaatacagacgtgttaacacttgtgtctggtggcctctgtggaggaaacttggggtttgtttcagggcgggaaggagactgacttgttacatttttttctttcttgaactgtctggattaaaaaaaaaactttaacgaaagcatgacaatataaaagatgcaaatcagaagtgtccatccccaaaaataaaaaagaccagaagtgttcatctcaatgcctgttttcaacgtgaacccatttctgtgatcagcacctagatcaagaaacaaaacatttcagtcccacacaaattagcttctttttaattattattatttattttgatttttgatttttttagagacaggatcttgctctgttgcccaggctggggtgcagtggtgcaatcatagcttattgcagccttgaactcctgaactcaagtgattctcctgcctgagcctcccatgtagctgggactacaggcacacaccaccatacctggctaatttatttttcatagatacagggtcttgatatgttgcccaggctagtttcaaactcctgggttcaagcaatcctaccacctcaacctcccaaggggccaccacgtctggctttgataagtttttttttgtttgttttttgtttttgagacaggatctcgcttggttgcccaggctggagtgcagtggctggatcatagctcactgcagccttaacctcctgggcttaagtgatcctcccatctcagcctcccaaactgctgggattacaggcgtgagccaccgtgcccggccaagaaaaggatatttttattgcatgcatcttcacatagagatgagccaccaggaagaatcctaccaatgggtgtggaggtgggcattgttctcaaactcttcctctcttttgtccctcccttgctgccccggacagtccctgtgctcaaggataggggatcagaggtgaatcagacctgaccttgcccggtcacagcaatgtaccagcaggagagaccctggttcaactctcagcttggctactgacctgctagggggtctcttaacctcttggttcaccctcttaacctcttggagcgtcagtgccctcagctggaaaaggaacattccacagattcctggactggcagagtggttgaaagggatagaaagaaagaaagcatgagaggtacctatagtaaatgatgaaggaatgatagctaagcatggtctttccacagggcctttgtgcattctatttctgcttcttggaacactcttccaggaagatgctttaatgaggggacttccagcagcatcaccagtggcaacaggacagcagggcctggccggcagggtctagctgtccacaggactccatccctcaaaaagaccttctggccaggcatggtggctgatgcctgtaatcccagcaccttgggaggccaaggcaggagaatcgcttgagtccaggaacaaaaacaggctggattcggtggctcaagcctgtaatcccagcactttgggaagccaaggtgggtggattacttgagatcaggagttcgagaccagcctggccaacatggaaaaaccccgtctttactaaaactacaaaaattagctgggcggggtggcaggtgcctgtaatcccagctactcgggtggctagggtaggagaattgcttgaacctaggaggcggaggttgcagtgagccaagatccagccactgcactccagcctgggtgacagagcaagactccatctaaaaaaaaaaaaaaaaaaaaaaaaaagggccgagcacggtggctcacgcctgtaatcccagcactttgggaggctgaggcgggtggatcacgaggtcaggagtttaagaccaacctggccaagatggtgaaaccccaactctactaaaaatacaaaaattagctgggcgcagtggcaggcacctgtaatcccaactactcggtaggctgaggcaggagaatcgcttgaactcggggggcggagcttgcagtgagccgacatcgcgccactgcactccagcctgggcgacagagtgagactccatctcaaaaaaaaaaaaaaaaaaaattagccaggtggcgcatgcctacagtcccaactactcaggaagctgagacaggagaatggcttgagcctgggaggtggaggttgcagtcagcagagatggtgccactgcactccagcctggtgggcagagcaaaactctggctccaaaaataaaataaaataaaacgaaaaataaaagaaacaaaaacaaaataccttccctgaccatcccaggagccatttcatgcccaccaccgtcacttcccaacccccttccctgcattattccccccgccccgcccccccccgcccctgcactcactggcacctgacactttatttcaggggtttctttgccaatgtctggttccccccgatggaatgtcagccccaggagggcagggaggtttgcatctgttcactgcaatactccaagccctagagcagtgcctggcacgaagcagaggctccacaacgaagctgggctgggagcccgactcattgtaattgccccattcctcctgcacaaccttggacaacttcttccaacccctgagcctcctctaccctcctgcaaaggctcagagaaggctttgccacccaggtcgactaggagggtgccatgggttctgaagcccctccgcacccttagcagggcccagcgcaggctggctgcgatgtttgctctttgtctttacggtgtttctgaacttggagttctggaggctgcgcctgccgggccgaggagggggccctttctgcagccgcaggcggaggcccctcgcagcccgggcgcccctccaggccgcggccccggcgagacgaatgcagcacacggccgcctttatggggcccgcagacagcgcgtcgccaggctaaccctgcgtggaaaattcggaggtggaaggcgaggcgccttattgagggggccggcagcggcggcggcggcggcgagggggcggcgggggctgtgcggcccgggccggaaacgtgagccgggctgggggcggcgaccacccccgcgcattccccggccctcccgggaccaccgcgcgccccggccggcaggtggaggagcaggaggcgccctcaccgtccccgccctgggaggacgccttcagggccaagctcccctggcctcgttgacctcctccgctgaataggcccttcccttttggggcggcaggactaaattgcggcctggggcccaggacacgggagcaaccagcgacaccggtcacttacggatgctgttaacacgatggtccgccccatggaccacaaattgaggctgagacactcaggagacggtggcacactcagatgccagggccgtgccccatggcctaaggggacacctgaaccacactagaaattggagcggcccctgaaagtggaggtcattaataagatcaaagttaagggcccaggacctgcaggtgcccagcccggagctgccatggtggggctggagccaccccgaggtacctctctgaacctcagttttctcatctgtcaagtgcggatgggccaggcactgtgtcagaagcccaacgaagaacagagggcaggagccactagcttcttgactcctgggtttccatcccaggcaaggcaacagacggatgcccctggcagagggacatagaaacaaaaagtcaagcccggcccagtggctcaggcctgtaatcccagcactttaggaggccgatgcaggaggattgcttaagcccaggagttcaagaccagcctgggcaacatagcgagatcctctctctacaagacatttaaaaattagctgggcatggtggcacgcatctgtagtcccagctactcgggagactgaagtggaaggattgctcgagtttgggaggttgaggctgcaatgagctgtgatcatgccactgtactccagcctgggagacagagcgagaccctgcttcaaaaaagaaagaaagagccgggcgcagtggctcacgcctataatcccaacactttgggaggccgaggtgggtggatcacctgaggtcaggagtttgagaccagcctcctcaacatggtgaaaccctgtctgtactaaaaatacaaaaaattagccgggcatggtgatgtgcacctgtaatcccagtcaccaggaggctgagacaggagaatcgcttgaacccagaaggcagaggttgcagtgagccgagatcgcgccactgcactccagcctgggcgacagagcgagattctgtctcaaaaaagaaagaaagaaagagcctggcacagtggctcacacctgtactcctagcactttgggaagccaaggcaggcagatcacaaggtcaggagttcgagaccagcctggctaatatggtgaaaccccgtctctaccaaaaatacaaaaattagccaggcatggtggcaggcacctgtagttcgagctactcgggaggctgaggcaggagaatcacttgaactcaggaggcagaggttgcagtgagccgagattgtgccactgcactccagcctgggtgatagagtgagactgtctcaaaaaaaagagagagagaggagcgaggaggggaggggagggaagggaagggaagggaagggaaaagctgcacaggttgcatatataattaacaccctgggtccttggattggaaggagagaggaggcatgagaggatgactggaggaaggggaaggcaggtgaccctccaggatatgggacttggggaaggggcaaacccctaatttcttttttttccttttcttttttatttttattttttttttttagatggagtcttggtctgttgcccaggctggagtgcagtggcacaatctcggctcactgcagcctcggcctcctgggttcaagtgattctcctgcctcagcctcccaagtagctgggactacaaggaccccccaccatgcccggttaatttttgtagttttagtagagacgggggtttcaccatgttcggccaggctgatctcgaactcgtgatctcaggtgatcctcccaccttggcatcccaaagtgttgggatcataggcatgagccatcacacctggcccaaaggaccaatttcagactcagactcagagaaggcagaagtgaagctcagggtagccaggtgttgatttttgcatttgccgttccctcttcctggaacactttcttacccctgttgtctctgcagctgtttccctcacttccgctaggctggggcttgaagatcgcctctttaaagaagctttctcagaccatgtgtctaagccctgctgccttggcccttctctttgcccctggcaaagatacttatttctttttattatcttgcatgcctttggttcacttgtttcttgtctgtctcctccacctgccagtgagctcagtgagggtgggacttcgttcacagctatagcctctgcccccaacccagcacacagtaggtgctcaagaaatgctcaagcagtgaatgaatgaatggacaaagccaggccgtggaagacaaagaaagcctcagctttctttctggtgacttggtttctggctagcagaggacaggtttcctgagttacagataagcagaaggtcaggtgaatcaacgataagggatgataaggctccaggacccaccggctgttcctgcctcctggggccccacagaggaagctcattttcagcttactgcagaacctccagcagagccggggcctgggagctgggagcctactctgactgccactgctgcggggtgagaattctcacacattgtaaacgctgccctggctcctttctggctggggcagccaggtggacctgccctgggctggacaggaggtttccaggtccccaggatggatggtgtgtgtgacggggcctcccagaccccaggatcctcttcctgggggcggggcttgggcactgggttcccacagatagaatagcttagagctcaagggtgagccagctgcctgggttcaaatcctggctcagccatttagaattgggcaagctattccagctgtactgtggtcctcactgtaaaaagctataatagtagaagtgtgtaagaatacagtacctgggcctagttcggggctctgatcagctcctgtgccatagatcccttttttattatacatttagattcatgtgtgtgtgtgtgtgtgtgtatatatatatatatatatatattttttttttttttgagacagagtctcgctctgttgcccaggctggagtgcagtggggcaatctcagctcaccacaacctccacctcccgggttcaagcaattctcctgcctcagcctcctgagtagctggaacgacaggcacgcaccaccatgcctggctaaattttagtagagatggagtttcaccatgttggccaggctagtctcaaactcctgacctcgtgatccgcccacctcagcctcccaaagtgctgggattataggcatgagccaccacgcccagccttagatttacctttataaatgaaattgtatagcattaaagtaaaacattatattaaactaaagtcattaaaatatttaatagctgaatgtttgatatggtgacagctgtgctttttggtttttgtttatttatttatttttgaaacaggcacttactctgttgcccaggctggagtgcagtggaatgattatggctcactgcagcctccaccacccaggcccaagcaatcctcccacctcagctccctgagtagctgggaccagaggcccacaccaccacacccagataattttttgtatttttggtagagacagggttcaccatgttgcccaggctggcctcaaactcctcagcctcccaaagtgctgggattacaggcgcaagccaccatgcccagccaactatggtaattttgaaatcaggaagaggacgaatgctctttctatgacactgtaaagagacatggacaaaggatttctgattgacaaagccaccgtccagctactgccactgtggtttcccacgtctgctcgtaagggaaggaaatgccaaattccagttggcggttagtgaaaatcaggacatccctttttttcccccagtccaagttcacagatccctgaattctcttcgagggccctggaggtggtggtgagtgataggatctcactggggatggtgcaggtgcccagaaggaggggagtcagatgggggctccctcaggggtttgagctggagtgctgagtgcccagtgtaggtggcctgggttggaatcggtctctgcccacactccctggagacctcggccagtggctgctggtctccaggcctcctctgaggaatggcctcctcggcctctagggttgaataaggaggaggtgggacagcgtgtggcctgtgttggcacaggggtctgggctcttgatagaggggttgggggagaggccgtcctgtgccttggagggggccccttccccatccaatggcctctccgaggtctgggcctgtgtggaagtcaccgttttgtgtttgtgtcatctgggtaagctggtgtgtctttgtgtgttggggtggatgtgtgtgtgtgtgtgcaggtgtgagtgtaggggcacatctaggaagggtgtcaggcagtgtgagtcagcgtgttgtgtgtggctgtgtgtgtgagcaggggtccgttctgagagtgcgttgtgtacgtgtgtgtcagggtttggtatggcgttcactggtgtgtgtgtgtgagttgaaagtctctggtgttagttgatgggagtgaatgtgagactgtgggtgtatttggggacgtggggggtggactgatgtgtgtgtgtgagcacacatgcagcagggttggtgggcggtgtccagtgtgtgtctgtgtgaacgtgtgtggccctgtcaccgccggctccaggcccagccacataaacttcacacccctgcgggcgggctccagcggccccgcagcagccgcgtagggcaatgggaagcagatgggccaggaaggaggccatatggggctgggggtgggggcgcattcctccctcccagggccgccaggaagccccctgcctgccggcccccccatcggggtgggagctagaactgacacagtaacaaatgtcctgtagccagcgtggagtcagcgtggagccggcatggaggcagcccccgccccacagcggggggtagagagagagagtataaatgagggggatccaggagatgccggcggggaagatgctgccctgataagccacacctgaccccacggctgtgcacccttgggcgccgcacataccccctccgggcccatttccttggcagggtggctgttggggatggaatatagggacgttccccccaccccccaccgcgccccctcgtcccctccccccctccccccgcctccgtttccagaccagggtaggaccctaactccagaaaccctggtagatgtcaacagcaacagggtaaggagctgctaacctggaacttgactgcattccggcgctggggagtggcgaagaggtgggctctggagccaggtctgcctgggttccagtccgtgctctgacacttcctgactgtgtaactatcatctggcaagtcacctcctctgtgtctcagtttcttctctgtaaagtggaggtaataataagagcacctccctccccgcaggcggtgatgaaggaagtgcttgctcatcctaggccaatcccaggttttggccaggcttggggcttcgtaaatgttagctacaagcaccagctcctgggggcttcccacacccccaggaggttgcctggacgtactttgcagaggagaccagagaggtcaggtactcgccagttcacacagggtttaaggggcagagatgggttcaaacccaggccttccatccccggcgcctgctctcctcaccactcctcagggagcatggctggcgcctcccttcccaccctctccagctccgcccctgccctgtctagggtgagctgctgggctgtttcttgtcacatccagatgagagcagaggctggggccctcttccagctgagacaaggtccaggaggtcgctggaaaggcggcaggctcctcccactgtaaccctggccccgacggtgggagccagccctgactttcaggccctaattagatttaggcagctctgggtgcagaccctggctcccctctccctgctgtgtgacccagggcaagggcctggagcactcagagcctcaggggtatccggggacagggtagcagggactcagccatggggaaacggcagcgactgttcttgcagcgagtgtctgatgaacggcccctattagttcccccctcgtggaggtcgagatcaggcagggccggagtggagggaagggcttagaagcagagcttgctctgggtggctttggcctggtctgttcacctcctccaaggctccctttcctgtttcccaaagcaacatcatcaggcaggtttgtcgggaggcttaacaggatcatgtgaaagcacttggcacatgctaggtgctcaaccagtgctgtgttggcttctctgtctctctctctctctttctctctctctctctttttttttttttttttaattgagacagggtctcacactgtcacccaggctggagtgcaatggtgtgatcatagcttactgcaacccccacctcccaggttcaagggatcctcctgcctcagtctcctgagtagctgagattacaggcatgggccaccacgcccagctaatttttgtatttttattttattttattttttggagacagagtctcgctctgtcgctcaaggtggagtatagtggcaaaatctcagctcactgcaacctccacctccctggttcaagcaattctcctgcctcagcctcccaagtagctgggactacaggcacccgccaccatgcttggctaatttttgtatttttagtagagacggggtttcgccatgttgtccaggctggtctggaactcctgacctcaagcgatccacccaccgccacctccgaaagtcctgagattacaggcctgagccaccgtgcccagccagtggcttctctcctattcttgtcccttgtgggcccttgtagggacatctgttttaagttcccacccagcatggactctcctttctctgtgcctcagtccaagggttttgggtggggcatgcactcagtactgaccaatcaggacaactgcatcctctcagccaatgagagacaggcctgggatttttgctggacccatggggaaagaggcacttcgtttctattggggttgctaaatgggctgggtggaatcctggacttgggggttcatcctgccttgttgaggagaggcttggctgagtggaggctgcaaagatggagaggaggcaagtcccacggatgaaatgtgaatgcccagatgcaatcatgcctgggactgttgttgattcctgctttgtgggagagaaactgaggccaaatccaaggtcacagagccaggaagggggcagaactgggatttgaacccaggccgactggcgccagtggctgtgtccttaacctccagactctacagaggcctttggtataaatccctccctgtagcctgaaatcctcacccagcctagtttttgagctcagctatttctgagcttcccaagggagaatgttttctgcctctggcagaaaaatcgggagaaaatgaaagccctgtggtctggctgcaaactcaatttgggcaagcttgggacaaatgaaaattctttccttctttcgttcttcctctttctctctttctcctctttctttctttctccccctccctacctcctcctttccttcctctcttcctccatccatcccttccttcctctctcttccttcccttctccctccttccttccctccctccctccctccattcctactccttccctctatccttcctcctaaccccttcctcactctccttcctgtctgaaataaaccagagcttactccagcccatctcacatcctggtcctgctctcacctctgcctggatgacttgcatctctgcccagttccaagcctagttggccatgttgggccccagtacagccatcaccagtgacacctattaaaatgcagatccctggcagggcgcagtggcacatgtctgtaaccccagaactttgggaggctgaggcggatggatcacctgaggtcaggagtttgagactagcctggccaacatggtgaaaccccatctctatgagaaatacaaaaaattagccgggtgtggtggcacattcctgtgatcccagctacttgggaggctgaggcaggagaattgcttgaatccaggaggcaaaggttgcagtgagccaagattgtgccattgcactccagcctgggcaacaagagcgaaactccgtctcaaaaaaaataaataaaatgcagatcctggggccccacaccagcagatgcatatttgtgcgtttggggcaaaggcagaggagatgaacacccagtggacattcagatgcaggtggttcttgggacactgggtgtctagggtcttgtagggcctggaagaccaaggttaaaggttgtgcttaggggccagccatgatggttcatgtctgtaatcccagcactttgggaggtcaaggcgggtggatcacctgaggtcaggagttcaagaccagcctggccaatatagtaaaatcccatctctactaaaaatacaaaaaattagcctggcgtggtggcagatctctgtaatcccagctactcgagaggctgaggcaggagaattatttgaactcgggaggctgaggcaggagaattgcttgaacctgggaggcggaggttgcagtgagccaaggttgtgccactgcactccaccctgggcaacaagagcaaaacttcatctcagaaaataaaagaaactgagtttcagagtggtcaagcttcttgcccgagaccacacagctggtgggtggcagagctgggacttgaacccaggcatctggctccagactctgtgctcttactggtactgtaggaagctttagttttgcttattttattcactgctgcatctccagtgcctgccttgtgctgggtcttaataaagatttgttgaatgaatgaatggatggatggatgaatagattgctcattgaagggagttgactcaattagtaggtgttctgcaattgctctttctctcctaaatatgttgtctaggctggtctcgagctcctgacctcaagccatccacccacctcgacctcccagagtgctgggattacaggcgtgagccaccgtgcctggccgggagatcttagagcagtgctaatcctgtagcagagtcctggccttctctttccactctgtgtagcagggatagtagcaatcccactgctcagggctgtcatgacttaagtgagacagtgccagggctgtgcccagcacaggagtatatgctccatgagccgtaacaggtttgatcagtttcccaggctcttctttactctgatttccttgtctgatcctatctccctctcaggccaaacagggccacacatggtgccaggcacacagtagttgctcagggaagaaggatagctacatgagcgcttgctgtgcgctaggctctttttaaacactcatgatctgatctacttcttccaacagccaacaaggaatggacccagtgtttggcccagcagaccctccataaatgtttgttgagtgactgaatgaaacagcgctggctacattggcagagtgcctggcacaagctctgccagcctcctacctgctgccagctcacagacaggcctgggtttctacatctgccagcgctgccaggagatgaactggccttgggggaggtagttcccggctgtggagcccgagggagcaaagctgcaaaggaggattttcctccacgcagttcagcctgggctgagtaattgctcactgggtcttggtccagcggcggccagggcaggtaggcatggggctgcaggagtcaccagttgatagccaagcctggagttctgccagccacagctctagggcccctggatgacagcagcatcccggagatgccaccatgagctcagaggggtcccatcacttctctgagcctcagtctcttggttggcagttgccccagctccatggggctgtgtgagatttgaaggggtcctgtatgtgaggctgggacaggtgttatgattgtgtggagggcagaagctgcctggaagtgtgaaaaggcctcgacctcagatgcagacaggcctggagggccttgggtgagtcatttccctctgcaagcctcggcttcctccagcctgctgtcatgagccaaagaaaggagaaagatggttctcaaaagcaggaacttttgaaccataagtgagaaaagagtaataaccgtagtaataatgcctataaaaaagggctttcaatcactcattcatttgtttttgtttttcttgttgttgtttttgtgagacagagtctcactctgtcacccaggctggagcacagtggcgcaatcttggctcactgcaacttccgcctcctgggttcaagcaattctcctgcctcagcctcccaagcagccaggactacaggcatgcaccaccacacccgctaatttttgtatttttagtagagatgggctttcaccatgttggccaggctggtctcaaactcctgaactcaggtgatccgcctgcctcggccttccaaagtgccgagattacaggtgtgagccaccgcgcctggcctatgagagtccatttttatgttctccatattgtcgcttgatgctgtttctccagctgcctttttggtgtcagattcacaaagaaatattggcaatcttaaaatttacattgattcaattgattaaagtgccagaggaccaaaacatatgttagagtatttttgagttttctcatctgtcacacttctgttctttgccatatgtgagtttaattctttaatatattcactaaaatgttttgtttaatgtatcatgattttgaacttatactctctatttgggatgggataagcttctcacttgtcactgatagatccataagtctacaggatctctgaattccaacaatacttggacttatgtccctggagtggaccctgaagttctataactaggatgtggttaggccatttggaattaaatgctcttttgttttgtagaaaatattgatgtgttaactttgtatgcagtttttaaatggtttagaatattagtaacttgctttcatacatattttatgaaacaaagttcattttatagtgaagaattctttgacttgtgtggtttgggtgagaaaccagttttccttcattaaaaaaaattgttaagtttccctaaaattctatttattaaaaataaaactatcaaattttacttaaagtaaaaaaccttacatatctcaattatatggtatcagtgtccagtattttggacctagtagaccatattagagtttacaatagggaaggaaggagatactgccatttcttcaatcactcattcatttttgtattccttcagccagtacactttagcttcattcattcattcattcatttagagaacattatcgaacatttatttcctgccagactaggatagtcagatttagcaaaaacaggctgggcacagtggctcacacctgtaatcccaacagtttgggaggccgaggcgggcggatcatttgaggtcaggagtttgagaccagcctggccaacatggtgaaaccccgtctctactaaaaatacaaaaattagccaggtgccatggctcatgtctgtaatcccggcactttggaagctgaggcaggtggatcacctgaggtcaggaattcgagatcagtctcgccaacatggcggaaccccgtctctattagaaatacaaaaattagatcatgaggtcaggagatcgagaccatcctggctaacacagtgaaaccccgcctctactaaaaatacaaaaaattagccgggcgtggtggcgggcgcctgtagtcccagctactcaggaggctgaggcaggagaatggcgtgaacccgggaggcggagcttgcagtgagccaagatcgcgccactgcactccagcctgggcgacagagcaagactccgtctcaaaaaaaaaaaaaaaaaaaaaaaaaaagaaatacaaaaattagctgggcatggtggcatgtgcctgtaatcccagctactcgggagactgaggcaagagaattgctcgagcctgggaggtggaggttgcagtgagctgagatggcgccactgcactccagcctgggcgacagagcgagagtccatctcaaaacaacaacaacaacaacaacaaaagatttagcaaaaacaaaaacaagaagatctggcgaagcatagtggctcacgcctataatgtcagcattttgagaggctgaggggggcagatcacttaagcccaggagttcaagaccagcctatcagcctggggaatatggcggaactccatctctacaaaaaaaaaaaaaaaatacaaaaatttaccaggcgtggtgatttgtagctgtagttccagctactcgggaggctgagattggaggatcgcttgagcctagaagatggaggctgcagtgagccatgattgcgccattgtattccagcctgggtaacagagcaagatccagtgtcaaaacaaaacaaaacccaacaagatcaacaacaacaaaccccagaatgcctagttaaatttgaatttcagataaacaacaaacacttttttggtagaactatgtcccatactctatctcttagtgcaagtgtgtcctatgcaacacttgggcaagcccgtgggaggtgttttgcccgtgcaaccccatttcttgctcacatagccctgagaggcgagaattattgcccgtgaggaaatggaggctcagagaagtgtgtccttctgctcaggctcatgtggacgggcattctggctgagctgggggcttcggtagagtcccagtgtcatgggcactctgtcacccctgctcacttcctggatggcagtttcgggaacagagagcccgtcttggcagccacctgacactttcccctgccccagccctcacctgttggggaaagtccctatgggtcacccacaactggaggctggtgtagccaggatgcaggctagggagtggagtgggcagaaatcctaagctgtgcggcggagggggcatcagagggaaggagataggtggggcagtggtccccaaacctactttggccacatagcttcctgcctgccccacagcccctggtcaataatcggccttgctgacactccaggtggggcctgggcagagagagggcccctggagtcacccctctccccacctgtgtgtcgttgggggaagtcttggcccccctcagggcctgagcctccacctgtctacaaagaagcattcattcattcacttattcacacatttattcactcatgtatttgtgctttacttctatagatatttcttgagcacctgttacgtgttgggttctaggcatgaggcacagggatatgccagaaaatgagacagactgaaagcctcgctctcatagagcgaggtctatggtctgatgggggagacagatcatagagacataaggaagataattgtgggtgggaaaagtgctaagatggaaacaaggcaggggaaggtgatggagtgtgactgagaccgggcagtctgggagggcatccctgaggaggtgatatttgagcagagacccagatggtaagaaggagcctggctgggcgtggtggctcatgcttgtaaccccagcactttgggaggctggggtgggcagattatgaggtcaggatttcaagaccagcctggccaacacagtgaaaccccgtctctactaaaaatacaaaaattagctgggcgtggtggcaggcgcctgtaatcccagttactcaggaggctgaggcaggagaatcgcatgaacccaggaggcagaagttgcaatgagctgagactgtgccactgcactccaacctggcgacagagcgagactccatctcaaaaaaaaaaaagagaaggagcctgtccaggggatgcgtagaaagggagcctggtggggctgaggtgggagaggggggtgggggtgcatcacctggagcttcgaaggtcgcagttagagatccacttggctcctcctttgctttgttcagactctgtgtcacctcctctgaggagccttccctgatgaccctggctaaaccaggcccttctttaccccttacccttatctgtagatggcatcatagtatctgtttattgggtgtgtggggatatcttgtctttcttcctccacagttacaaggccagctgggtagagttatcatgagatgcctattgactcccccgtggtgcagaaaatgtggccacaaggatcccagcatgggtgctgttgatggatggcagggaaaatcagtgccgtgttttatggattgcagttttgactcaacttaagcctcagaagccaactctggaacccaagccttgagccccaaaagattcccccaaaatcacagtgacaatcatggctttcactggatgcttgctgcatggcacgcactgctacgcaacctttcaacatgtgcgattcactggtatttagtacatgtgcagtattgtgcaaccactgcctagatccagaacatttccaccaccccgaaaggaaaccctggactcacgagccatcacttcccatccctccaacaccccagcccctagaaaccactcacttagtttccatctgtgtgaatttgcctttccatattaatggaatcatgtactatgtggcctttcacatgttcacccatgctgtagtgcatatatggtatgtagcatgtaggtacacattttatttctgcatcagttgatggccatttcagtttcggttgcctccactttctggctatcatgaatagtgctgcaatgaacatctgtgtacgagttttttgttggtttattttgagacggagtctcgctctgttgcccaggctggagtggggtggcgggatcttggctcactgcaacctctgcctcccaagttcaagcgattcttgtgcctcaccctcctgagtagctggtactacaggtgtgcgccaccatgcctggctaattttaatacaaaaaataatttttgtatttttaatagagacggggcttcacgatgttggccaggctggtctcaaactcctgacctcaagttgatccacctgcctcggcctcccaaagtgccaggattacaggcgtgacccactgtgcccggcctgtgtataagtttttgtttgaatatctatcttcagttctttggagatatacccaggagtggaattactggatcatatggtaattctgtttaatttattgaggaactaccacctaagcacttcaaatatataaatagagatgggatctcactatgttgctcaggctggtcttgaacgcctgggctcaagcgatcttccttccgtctcagccttcaaagtgttgggattgcaggtgtgaaccattgtgctcagctgacctaagcaccttttaaagcactcatgatcctggggaacgctcacaacaaggcaatgagggaggctctgtgctgcccccattctgcagatgaggaaactgaggctcagaaagcagaattcatgagccaaggttacactggtgagaaatgatgatgtcaggcctgttggattccaaaccaacttgaacctaaagctgagaaggaagagtgtgagaaaaaagagagattatgagagcagtaacaagggtgacttcggtccacacttagcctcttgagttgccatctgtggaaaaggtgaggaaagaggtaaaagtcagtgtttctctatcaaacttgcatggattcccaccccctcctgctccgtcctggctgagtgaggttgggcaagctggttcacctctctgtgcctcagtttccccagtgaatggtgctaaggagaaaaactccctcaaatggtgaggataagaatgaaataaggccaggcgtggtggctcatgcctgtaatcccagcactttgggaggccgaggcggatggatcacttgaggtcaggagttcaaggcgagcctggccaacatgatgaaactctgtctctactaaaaatacaaaaattagctgggcatggtggcaggtacctgtaatcccagctacttgggaggctgagacaggagaatcacttgaacctggaggcggaggttgcagtgagccaagatcatagccgctgcactccagccggagaggcagagcaagactctacctcaaaaaaaaaaaaaaaaaaaaaaaatttaataaggctggcctgctgctatggttatcaatgttgttattatccttttctacacaagggtccccccagccccagaatcccatgctcttgtttcgggtgcagctctggggcaaaagggagtcagggacccccagaatcttctccccagggttggaaatgttgggtggcccagaagtagaagtagtgtctacttcaaaagtcccatgtccatgctacaactgaatgttccagatcagaaaacagcacatagttttccagaaatgctgggaccttatctcctcaggagtgagagtagcctggacccattaattcaccagaaacacattgtattttaggccagaaacaataataactgtggcctgttaagtggatgtcagagaataaaaatctaatctgaatttgtaactctgtcagaaggaatggggtgaccgagaattccacaggcgagttttcaacatggacacagggtggggggtccctgagcctctctgctgaggttttgcacagatcagggcttgtggagaacaatggggacattctttgagcacttgctgtgtgccaaggcacaaaacaaccctgggaggctgtactgttagaagttccgttgttcagatgggaaactgaggcccagagaggtggagacggttgcccagagttgaacagctaagaagcggctgagatggggcttgaacccagacagtcaggatctgactggagcccaaactctgaaccacgtgtgtctttctcagggaagtctggaaaaatgtggtttagtgttctgcacaatgaagtaacttgttcaactgaggtcactggctgatggtgggagtcactgatggaggaaatggggagagggcccaggaccccccaggaagtgtcccctgtctcctttgctgggtattttccttccctgactcttggcctgtttctttcttggtgagtgtatgtggggtggggttagtgagaaagggagaccccagctctggcgttgcgggagtgttaggatccaaggccaggcctgcagccctgggtccctcctgcctgggaggtacctggggaagtctgcagcctgtctacactggtgaagcctcagccccaaccagccccctgccctgcacttgccaactgggcaccgccactgtcggcaccacatccccagggtgtgtaacaagtgtcacagcctcacccagcctcagtttcctcccctggaaaatggggatagccacgacacgtggtggggaaggttatatttacatgacctgggctgttactcttattcctgcctccagtaagaagccacgtggagtgtctgccatgctgaggagagggcacccctggccggagcccagctggatgtcaggcctgaggctggatgtcaggccaaagctggctccagcccagcagcctgacacgaaggggagggaggcctgagtcggccagactcctgagtcactgtttcccggctctgccaggccaggcgggaaaagggggagcggggcggagggaggggaaggggataatctgggggagggagggagtggagagtgagacaccagttgtaaccattgttgggtgggacagacagaaagccacctgccaggggggcaaggagattctggggtgtcagagtggggtccttgcacttccctgcattataggctgcaaactcctccctccctcgccaccaacacatacacacacacacacacacacacacacacacacacacacacacacactgcactcagcttcacagctttccttctctttcttgagtgtgttgaccaggttccagcctcagggcctttgcactggctgtgttttctgcctggaacacttcaaggttctttctcaaatctcaggcttcagcttaaatgtcacctcttcagtgaagctgtccaggctggagtgcagtggtgccatcatggctcactgcagccccaacctccccgggctctggtgatcctcccacgtcagcccctcgagtagctgggaccgcaggcgtgcaccatcatgccctgctaatttttgtatttttctgtagagatggggttttgctgtgttgcccaggctggtctcgaactcctgagctcaagtgatccaccagccttggcctcccaaagtgctgcgattgcaagcctgagccaccacactggggcctgcctgagctttctttttcttgagacagagtctcgctttgtcgcccaggccagagtgcagtggtgcaatctcggctcactacaagctccgcctcccaggttcaccacccgggttcacaccattctcctgtctcagcctcccaagtagctgggactataggcacccgccaccatgcccggctaattttttgtatttttttagtagagacggggtttcactgtgttagccaggatggtctccatctcctgacctcgtgatccgcccgcctcagcctcccaaaatgctgggattacaggcgtgagccaccacgcccggcacctgcctgagctttaagtgtgctcttcctactccccctcccaattcctttagttcatccattcattcatttatttgcccggaaggtattgcgcacctccttcgggcagggccctgctttaaacagtgaacagagtagacaacctgcctgccctcatggagccatcactccacccaaggagatggcacaatgagcacaccgcacactgggctggaacaggtgtctctggaggagccaggcacaggtgggggagccaggcgcagctgggggagtcaggacatagcgcgggggctttccctgttggagggggttgagtacggtgtctcagaaagtgatgccagggagatctgcaggacgaatcgaaggaagccatgtgggtgtctgcggagagagagttccaggcagagggaacagccagtgtgaaggccctgaggcaggggtgtggtgggcagagtcaaggagcaggcaggaggccagtcgggtgggagcagagtgggcgaggccaggaggtgaggccagcaaggggacggggcgggcaggtggggcaggcaatgaggaggatgtggcttttgccttgagcccctggagggtcctgagcagaggggctgcagagacatggtcaagttccaggtggggttagggcgagaactgaccttccaggcagacaggcagggtccccccaccttgcccctgccctgagatgaagcgccagccttggatcaggaccctgtccagaggtgggccagggctctcaagccagactcgagtctgcactgggtagggacagcttcccacggccagccttccccgtggaggattgcttgcgggggaggggtcccctaagtctcttctctttctccctctctttcgtaaccatcagcctagccagacctttggtcaggcctggtggagagagtgttctctgtcatcatctggccatgggaaaggtgaagtaaaagccaccagtgacggagagaagcagcctgtggccagcccagcaccaccctcaccccacgcacccgtaggctgagtgcctcatcccttggccatggtcccccaacctccaacataatcaggcccgtgggagcctggccagaactgtggccagtgactcagcaggaatcaccccagacaggagccagagccccggtgtccagaccagaaaccacccctgacctgttcggctgggcaggaacagggacagagcaggcggaaaagctctcagcccaggatagccgggggagaggggcgtgggaagacccctgtccagatgcagttcgtggccacccaccctgatggtgtctgctgaggtccagatcgtagttttaggagggggttcgtggctgttctgcccaattctgttgaagccctgagcatcagcctggctttgatgggttatactgggctgttgtggtgtagcttgtctattccattgcattgtttctgttctattgtgtgttctggtctgttctagaacctaccaatcctttctattctattgtgtttattcattcagcagatacttactgaccacccctgtgtgccaggcagtcttccagatgctcgggtcacaactttgtttatttatttatttatttatttattttgtgacggaatctcactcactctgttgcctaggctggagtgcagtggcgcgatctcggctcactgcatggagttacaactttggatgaaatgagacctctgccccagggcgttcatggggagaccagcaactgataaatatcaggtagtggtaagagctgagaacagcagcagcagcatcaaagcagagagccacagaaggagcgaggcgcaggctgcgttcacagtgcggggagcagggtcaggagcagccgcagcctcactggcaagatgacagtctttttttttttttttttttttgagatggagtctcactctgtcacccaggctgcagtgcagtgttgcaatctcggctcactgcaacctctgcctcccgagttcaagtgattctcctgcttcagcctccggagtagctgggattacaggtgcgtgccaccacacccggttaatttttgtatttttagtagagatggggtttcaccatgttggccaggctggtcttgaactcctgaccttaagtgatccacccgcctcggcctcccaaagtgctgggattacagatgtgagccaccgcagccagccaagatgacagtcttgagcagagtcgggaaggagctgagggagggaggcacacagatatcaaggggtcaagaaaagcattctaggcagagagaacagcaagtacaaaggcctgaggctggaatgtgcctagtgtgttccaggactggccaggaggccagtgtggcagccaaggggagcagtagggaagatggggtgtgtggggacatggcttggaggaggttaaagccaggtgggagagagcaagagggacagagctctccacggtcctcctggggtgtggggccagctggatggccttggatagggggtacgcgtgtgagtgtgtgtctgtgatgtggacagatgcatgtgggtccgcgtgtggtgttgtgcatccctgtgtgtctgtgtgcgcccatccatgcacctgcattatgtgtctctgattcaggcagttagtgcttctgtatttgtaggtgcctgtgggtatctgcagtgtattgtgggtgtgtgttgtgtgtctggaatttggtgtgactgtataggagcaggtctgtgtgtgtcacgtctttttttggcaggtgcctggacgtgtgtgtggagtgttgtttgtctgccatgtattttgtgcatgtgtgggggtgtgtgtgtgcattagtctatgttcctgtgattgtggcatggtgacaagttttggggttcctgggggtgcaaaggcatgggaaggagccttcctgcagacccaccccaggccagcagcagcccctccccatggcagcagatacacactcactctgatgccccgggaggaggctgggcaagcagccccagagcagcaggcagcatcaggtggagaatgagggtgggagctcagttcagccaccttttctaggcatttcagggcctgtcagaagctcccatggaagatgtggaggttggggagcagtagacattcacaggcctgggaatgggggtgcttgagtatctggggcacccacgggaaactctggcctccttgggcttaatgggtggagccgggtttttgcacacacgtggtgggggcgactacatgtactgagctcatgccagagtatgagaggagacagtgcccgacgtatgcacagatgaacacatgtatggaaggataagtatgtgttcaagggtggacacatgtgaacacagacacttgtatgtagggacaaacatttgcgtgcagggacagacacacacatccaaatagacacacaggtgcaggagcagacacttatgtacacaaatggatgtgagtgtacatggatagacacacatgattgtcctttgtgggccccagaacctctcctgcacacacttgcacacacatgcacactgactcacatgcactcacgtgtgtgcagggcctggtctaccatgcacaccatgcatatagggtccctatgcatacagaaaatccccaaatgggcctggcatggtggctcatgcctgtaatcccagtgctttgggaggccaaggcgggtggatcacctgaggtcaggagttggagaccagccttgccaatgtggtgaaaactcatctctactaaaaatacaaaaattaagctaggtgtggtggcaggtgcctgtaatcccagctactccggaggctgaggcaggagaattgcttgaacccgagaggtggagattgcagtgagccgagatgacgccattgcactccagccttggtgacggagcaagactctgtctctcccccaaaaaaagaaagtccccaaatgtaatgtgtgcctctcatcctcagtatcaggagagtgctgagagcacacacggctgacattctctgtgtggggagccagcacatggccctgggagccaggcctggctgccttttggcctttgtgatcgggtcctgtactgtgcgctttactttctgtgccttggtctcctcatttcttagcgaggactgaagctgttaacccatgccaagtgcttggctttacatcaaatagtaaaagttactcttactcctgtctggtgccagcctaggctcatattacagacaagaggcctggggcagtggctcatgcctataatcccagcactttgggaggccaaagcgagagggtcacttgagcccaggagttcaaaactagcctgggcaacatagcaagaccccatttctacaaaaaattttttaaaaaaattagccgggcatggtggtgtgtgcctgtagtctcagctattcgggaggctgaggtgggagtatcacttgagcctgggaggttgaggctgtaatgagctatggtcatgccactgcactccggtctgggcaacagagggagatcctgtttcaaaacaaacaaacaaacaaaactgggcccagaaagagtaaggtccttgcctgggaccgcacagccagaaaatggcagattcaagattcaagtaccctgaaagtcttctgtgcccagaaatacacacacagggcccacacatccacttggaaggatacccaggactgtgcatgcacttacagccaggaccgtggccacagaaaggccctggggtcagcagaggctggaatggtcagtgggaatgttccctcccagccagggcttgcaaattccagaacctccagtgatagctttcgggagcctagattcttcctactctaacctctgcctaaaattccatttcttcttcttttccttgctttaagcaagggtcagatgattccaatgcctgcagatgctaggcaggtacttaaataagttaagggtgaagcaataggggttggtggagactgtgatgggtgtgattcattgccacgtaggaaagccggcccgctgctgtgggaaaacgggaagtcagaattgtaatagaatttttttttttaaagtgactgagtcttgctctgtcaccaggctggagtacagtagtgagatcatagtccactgcaggctggaattcctgggctcaaaggatcctcccctctcagcctcctgagtagctgagtaggtgcaagccaccacgcccagctaatttttgcatttttagtagagacagggtttcaccatgttggccaggctgatctccaactcctggcctcaagtgatctgcccacctcagcctcccaaagtgctgggattacagaagtgagccactgtgtccggcccacacctggctattaaattttttttttttttttttttttttttagagccagagtctctccatgttgccctggctggttttgaactcctgcgctcaagcgatcctcctgcctcagcctcccacagtgctgggattataggtgtgagcccctgctcccaggctgattttgtgggcaagaaattccagttgtttctaactctgtgggggtcaaacaagtctcctctgtccctctgtgggtctggttggtccgagcaccccccgtttgtagtctctgcctgttcactgaggccagaggctgggtgcttgctgtgtgccctagggaagggcctgggcttctctgtgttcaatttcctcatggccagaccctggggaggacacacatggtagagagctgagactctccaggggagagccagacctggacagcagaggaaggaccgtcatgcctgaaaaagtcatttctctcctcatccctactctgcccgtctcctgctatccgcagggaacttaatggagaaaacaccctgccagtgcctgttttcctttccatcctgcggtgggtgccagctccagatgagtgactcagggcttcccatggcagcagataaacactcgctctgatgccccgggaggaggccgggcaagcagccccagagcagcaggcagcatcaggtggagaatgagggtgggggctcagctcagccaccttttctaggcctttcagggcctgtcagaagctcccatggaagatgtggaggttggggagcagtagacattcacaggcctgggaatgggggtgcttgagtatctggggcacccacgggaaactctggcctccttaggcttaatgggtggagccgggtggatagaggggtagggtgtcagaattggcttaagaatttcagagtgggccgggcattgtggctcacgcctgtaatcccagcactttgggaggctgaggcaggtggatcacgaggccaggagatcgagaccatcctggctaacacggtgaaaccccgtctgtactaaaaatacaaaaaattagccaggcatgctggcaagcgcctgtagtcccagctaatcgggaggctgaggcaggagaatggcgtgaacctgagaggcagagcttgcagtgagccgagatcgcaccattgtactccagcctgggcaacagagcgagactccgtctcagaaaaaaaaaaaaaaaaaatttcagagtgaggcaggtcccagcaggccagggtcattatggcagccttcctggaggagggggctgaaagtagctctgtggctgctagccttgaagtcaggatacctgggctcacactagatggttggaaagcatgaaggcagtgactatgtcatctcagtcacttgtgtcctcagctcccagaccagagtctggtatacagcaggcactcaataaagatctataggccaggcatggtggctcacgcctatattcccagcactttgggaggccaaggcaggaggattgcttgctgccaggagtttgagaccaagcccaggcaacatagcctgtctctccagaataaaaaacaaacaaaaacatttagccgggtgtggtggcactcacccatagtgccagctcctcagaaggctgatggggaaggatcccttgagttcaaggctgcagtaagctatgatggcaccactgcactccagcctgggtgagagagtgagactctgcctctaaaaaagtaataattaaaaaaatatttgtaggccaggcgtggtggcttatgcctgtaatcccagcactttaggaagccgaggcggttggattacttgaggtcaggagttcgagaccaccctggcaagcatggtgaaaccccatctctactaaaaatacaaaaattaaccaggcgtggtggtgggcacctgtagtcccagctactcaggaggctgagatatgagaatcgcttgaacccaggaggaccttgtctcaaaaacaaacaaaaaaaagatttgtaaaatgagatgacagaaaataatagctttagggaacactcaccctgggctaagaaccgtgaacaaccctatgaggtaggtgttattattatcttctattttatacatgaggaaactgaggcacagagaggttaagtaatatgcccaaggtcatacagctagcaagtgacaaccagggttcaaacccaggcctgtctgcaaagcccagggcatatcacttcctgaatggttcgatgtctgtcactcccacggggcggtgagggccataaacgctgggcttatctgttttggtccctgctcatctattttggcctggcatatagtagatgcttaataaatacttgttgaataaattacaaaagtcctttgggtcctcagacaagtcacttctctccaagctttggtttccccatctatgcaatgggcatactctaagtaccaacctcattgtgttgttttgacaaagaaatgaaagagtggaggaggattgtggctctgtaggaaaagttccagagtcagccagactgggttcaggtctacactgcctacccttccagctgtgtgaccttagacaagttccccaccctctctgagctgcagttttcttatctgtgtgatggaacagtttggaggctgggaatctgggttctctcgggcccctgtcaagctctgcctcgggtaacgactggccctggagcctccacccctcagatctcaggggcactaaagcttctgaggaggtggcttctggactcatctcagacggggcaactcaccccagcaggcaggcagagaggatggctctctttgggcctgacctagggctaagaaccttcttgttggagtgggacagggcctgagctcagagttccagctgcctagcaggtttgagcttgcactgggttaagcaacgccctaccccactccacctccaacgagggagatgggagctcttttgaaccaagcacctgctgagtgccaggctcctgctctgaaacccctcaacctccctctcctgtgaggtgggggccagggccatgcccatttcacagacagaaaaacaggttcccagaggaacctcacccaagatcatagatcccagctcctccagctctgagctgtctcctctgcctgacccttcttagatcgaggagggagatgggtgagaacgttctctccagagaaggaaggagtctgatgactccacagcaggcaggaatggcagctccaactctctttaggggtctgtgtcattttgcagccttaggagcagcttaataccattttcagatgagaaaacagcccatcttcttctgcggggtgagcgctccttctccttacactccctctctccctcccccttccctccgagccctgagtaatctgcccctatctcttgctgttcctcagacatactgggcgcacttccaccccagggcctttgcttatacaggtccagctgcctgggacgccctttctcctcttctcctggtggctccttctcttccttcaggtctcagctcaaacctcatctcttcggagatccctcagcagccctaaagcgcccccagctcagccccctgttaagttttctttcatgtcctggtcgtatctaatgtgatctcactggttgcttcctttgctggtttcttctctgtctccccactggaaagtgggctccctgagactgggtctgtccatcccgttcatgctgtgtccccagacctagcccagtgtttggcaagtccgtgtctgctgcaggagtcttctgaatgaacttgggcatagctaaatgcctggcaaagtctctagtgacatcagctgcccgaggggagacaagttggaagaatagggaaatcacacaaacttgggttcaaatcctgcttgctgtgttaccttaggcaagtgccctgtgccctctctgttttgttttgttttctttttctggagacagggtctcactgtattgtccaggctggtctggaactcctaggctcaagagatcatcctacctcgacttcccaaattgctgggattacaggggtgagccaccgtgcccggttgctctgccctctctgcttctggacttccatttcctcggctagattgagggatgaccacagtgactatctccaggattgttggaaaacctagagattcgatgagaatgggaaccagccagccccaagtggtgcccatatactgtcatccctgccaccctcttcaccttcccagccccgaagttccccagctggcagggatgagtggagaggcccctgtcaatggtgtctgtgctgaacaagtcccatttgctgctgcctcctccccaggccagaataaacgtgcacctgccccaggtcacagagcacacagcagggagccgagggggtggggcagggagctgagggctggagcagggctcctggtgtctctgaggacaaaacagtccattgtggccctgtgggtattgagggaatcacagggcctgaatggaggcgggtgaggaggcagggcaggtgtgggagcaggtgtccacggtcatcccacggcatcgcccctggggggaagtgcccccctatgcgtgccctggaaccggcctggctggtcggacacctgtcccctgcagcttcttgtcaggagacaacataggcgtgagccaggccccaggggtggggtgggatgagggagtggggggtgggatgagggagtggggggtgggatgagggagtggggggtggggaagtagaagatgggaaggatgggactgggggacagagactctggggtctagggcagagagacccaggatagaatcccagccctgctccttcaggctgggaacactggacaagtcacctctttaagcctgtttcctcattcacaaagtggggctgaaactcccctctgtgccccagtgaattttccaggcacacgcatggggcggggtatggggggctttgatgatttggggcctcagtctgcccacagcctccctcccagaaagggttcatcattcttttactgaagaaacacttaatttagaaaaggccgggcgcgatggctcacgcctgtaatcccagcactttgggaggtcaaggtgggaggatcgtgtaagtccaggagttcgagaccagcctgggcaacacagcaaaccccatccctactaaaaatacaagaaattagcaggcatggtggcatatccctatagtcccagctatttgggaggctgaggcaggagaattgcttgaaccccagaggcagaggttgcagtgatccaagatggcgccactgcactccagcctgggcaacagtgtgagcacctgtctcaaaaccaaaacaaaaacacactcttattgagctcctactgtgtgccagaaccatgctaggtgctggggacacaaaagtgagtgggacagacaagtttcccttactggggaagaagacagaacatccaaaggataaagaatgagcaagagaattccagacagtgatgcgggcaccaggaattaaattgaagttgtgctggagggtgactccacagtgtggtcaaggagggctctctgaggagggacctgaagccccgaggaggagaagcagaaaagaggagcaggtggggagacctgggggtgggctgcaggcttcaggcaaaggcctgtggtaggactgagcttgcatttgcacttgcagaggaagtgcggggagcaccccagcccaggaggtatctggcccgaggggaccctctcagcctacccctgcccctccctgtccccggaggctgaggctaagaggcaaggtgcgggccaggctggaggaaatggggccaagacccgtctggccagcagactctcctgggactgctaatatcccaagtgctggtgacaagacacagccccgggtggcagggggctgggggcctgagactccgtaaacagccctggctcgtaaagctgatcaaagcagcaggcctgtcccagccctggccacttcctgcagggcccagagccctggcctgtgggagatcctgggaagggcctctcagcagaggctgctttggggtctctaggcactgggggcaggggcaggggcagggccaggtccccgagcctgtcctggcttcggttttccctcttgttttgcaatgaagactggctggaacctctgagaagcctgtttcactgcatgtctttgacaaaagcttggcctctggaaccggaggtctgggggtttgaatcccagtcctgctacggtgtgacctcaggcagtgacacccgcacctcccctaccgcccaaaactgtccttagctctaaaatgaggataatgatggtacctatttcaacagccttagactgtgaaattttattgatatgatttctaattatagttcattaattatctaatgacaacagtgacagtagcaggcatcctggtggaaaaggcatcccaggttgcaggactggctgaggtttgtggagccaacggcaaggattgttgggaaggtcccggctcccatgtgctcctcctgggccaggtctgggcaaagagaggccccgaggtggaggatttccaggcggagtggaggttgccagggctacagcccctggcctgacgtgaagtagcttttcccaggcctggctccaagaccccaggggtctcactctctcaaatcggcctgagaagatttgaggatgaaaacagacccaggactcggccaagtctcccctccctgttacccactcagcctggccccaccctctcacgcccggactgttgcggtggcctcctgggctccctgcctcccattcagtccccttcggtccccttttggccacagaagctaagtcagacagaccctgtccctctgctcagagccctccagggttcccaccccactcacaaagcctgagccctcccacagcccacaggcccaaccagccaaggcggagtaggcctgtcacctcccaacgcctccctgtcactcactgagataccgcctcaccacgtaaaaccaccacggcccgcatgccagctgcctctcccggcctggtgttttcattttctttagcactggttcccttctgacgcctggtataaaatccctgttcatcttctccgtctctgccacaggagagtcagcaccatgagggcagggatttttgtttttgttttcttccattttgttcccagccatatctatacccagttcctaaaactggaggcacttaataggtgtctgtgggaggcaggaacgggtcctcaccagctctaggggcaggtactatcgttatttccactttacgaaggaggaagtgaaattgagcaagacctcacacagctgggaagcggaaagtcagtgccttgatgatcatgatgatgatgatgataacaacagctaagatatattaagcacctactgtgtgccaggcaccgttctgggtgctggaacaatagcaaaagaaaaacaccaggtgcggccggcaaggtggtgtgtgcttataattccagcattttgaaaagccgaggcaggcagatcacttgagcccaggagtttaagaccagcctggccaacatggtgaaaccccgtctctactaaaaatacaaaaattaggctgggcgcaatggctcacacctgtaatcccagcactttgggaggccgaggagggaggattacctaaggtcgggagttcgagaccagcctggccaacatggagaaacccccatctctactaaaaatacaaaattagctgggtgtggtggcgcatgcctgtaatcccagctacgagggaggctgaggccggagaatcgcttgaacctaggaggcggaggctgcagtgagctgagatcgtgccatcgctctgagcgacaagagcaaaactccgtctgaaaacaaaacaaaataaaacaaaaaacagcacgaaaattaacctggtgtggtggcacatgcctgtaatcctagctgctcaggaggctgaggcaggagaattgcttgaacctgggaggcagaggctgcagtgagccaagattgtgccaaggaagaaaaggaaaagaagaaaaataccaggtgcattgtaagtacgttacagcagataactcttggaatcctcagtggggccctctgtggaggggactattactgtccccatttcacagatgtggaaacagaggcccagagggattaagtaaccggtctctaacaacaacagctccaacagcagcccccatgtactgagctgtgctctgggccctggcattcacccggtatccctcacctttcctacgcttttggttatcctctacagcaaagaacccagcctctggagaagcagtaagtcccagcccatttcccaggctcttctgccccctgggcacacctggtaccaggcatggacaggcccaaacaccgaggccattgcacatttgctgcctcagagggactcaccttggtgtctcagtttcccaagactcttcggggtctggggcccatggaacgggtaagcagttctttctcattcacacctgggacccctgctgtccccagggagggcctgaggaagtgttggccactctgctgtgtgaccttggacaaactgctgtgcctctctgatcttccaggctcaaccaactccatggggtggtggcttgctgagaaaactgtgggctaggatctgtgagccagggtctgggaggagtgaggaccattcatagaaagcctggcaactgggagcacctgcatcctgcctgggaggaccacgtggagggagcagagccaccttcacccctgtctcgggcctgttttcccttcccgctctgccctgtactttgcaagcccccaagagatggggttgggtcctgtccactgctccccctccctgttttggccacactttctcactaggaaagaaaatgaccaggaggccacattctccaggcccccaaagcctgcaccagggtctctcccaatccacatcattccaccttttcccgctgccactccacctctgtgaccccttctcctgtcactcagtccttgcaataactaaggattcagccagggttatggctctgcctcttttttttttttttttttttagacggagtctcgctctgtcgcccaggctggagtgcagtggcacaatcttggctcactgtaagctccgcctcccaggttcacatcattctcctgcctcagcctcccgagtagctgggactacaggcgcctgccaccatgcccagctaattttttgtatttttagtagagacagggtttcactgtgttagctaggatggtctcgatctcctaaccttgtgatctgcccgcctcagcctcccaaagtgtggggattataggcgtgagccaccgcgcccggccggctctgcctcttttgccgattgggagacaagtgcaaagaggtacctggcatggttctgagtccagggaaagacaggacgccatccccagagggccatggtgatctctccagaggccagccctccccactgtgcccttgcttggggcaataatggctcagctgatggaccacgcgcggtgtgcactgtcccccattttaagaaagagggaactgggcttcagaggggacagccacctgcccgaggtcacccagccaggaggtggcagtgcctgtctgatgcagagcctgtgagtatggtgggcaggggagaatgaggcccagcgagaggaacggccctgcccaaggtcatgccaccgctaccagggcgcagaccccccaggctgggccagtgctgagagcactggaatcccaggcagagtcttcccatgaccctgggtgggggtgggggctggcctggcatttcctgtttgggcaggacccagggcatggcctgagtggggagatagggagacttcctacggcccctccccgctcaggaactagcccaggatgcagtgcggggcagggttggggcccgtgtcctgggtcccaggccagctctccccttgatatcctggtggtcttgttctcgtcccccaaccccacctcagagtctccacatccttggatttctccattctgggagttcaccattcaatgaacagatccagttccaggtctttaggagagcctgaagccatgaccttggacaatcacctcccctctttcagcctcagttgcctcctctgtcaaacagggtgattgattgtgaggatgaaatgagaagtcgcctgcccagcacttcgggaaccccactgccccaagggagaaagtcaccaaggtcctgacaatgacctcatgtgcttcccagacacagacccgaggccacagaggttgggggacctatgtgaggacacacagccagctgaggcctctccactgccatttcctgggacacagccatgaagtaccaagagggtgcactattgtgtccagtgcactgagttcaccccagccatgctgctcactggctgtgagtggcactgggaaggtcaccttacctctctgagcctcagttttctcttcttcaaaataggaagaaaactaacctgatggcagaacttaatgagccgattaagtgcacaagccaccagtggcagagtctggcacctggtaattcatggtctccccagaggaggaggctgtggtccgctgtctcgggtcccttcgggtgggatgaagggcccccagctgggaagggtcgagtccagctgaggttattgggacagccaggagcagtggctgacccatgctctatgtaagcaggaccaagctcgtctgcacctcaacactccacagcgtctgccctgtcaatgctctggggtataggccctgctgacctctcccaccttattcccccaccacactcctttgctagcaccattctctaaccacgaagcccgctttgtgttcctccattctacaagctcattccagcctcaagatctttgtagctaaaggtctctctccctaggtcacacacccccacccccatatttcccctattttattttttatttgtatgtatttatttattttgagacggagtctcgctctatcacctaggctggagtgcagtggcatgatctcggctcaccacaacctctgcctcccaggttcaagccattctcctgcctcagcctcccaagtagctgggattacaggtgcatgccaccacgccaggctaatttttatattttcagtagagatggggtttcaccaagttggtcaggctggtcttgaactcctgacctcgtgatccacccgcctcagcctcccaaagtgctgggattacaggcgtgagccaccttgcccggctcccctattttatttttatcttctatcattggaatctaaaacaggacctagaataatttaggcactaaataaatgaaaggcaatgaataaatgaatgcattctgattttgaatctaatgagtctttgttttttaatagacccatttaactcatttacatttattgtttaaatggatatgtttggtattgtgtgattctgtattgtgttttctgttaattgactgattgaatgaatagatgaatgaatgagtgagtgaagcaaagtaaatttcaggttgctggggtgggctgaagattggagctttcctgggctatccagggtgaaaagagcaatggcattgaccctagacccctcacttttgcaattatttattccacagcccttgatcccccagatgaaggatctgtccattcttctcatctccagcctctccaatgtaaccttcatcctgtccctcccaaaccacctccccacacagggagcatcaggcttatgattctgggttgtaagttagattctcattcccatgcctgctcccccattaactggtggtgtggccttgatttacctgagtcttcatttcctcacttgtaaaatgggatcatagtatttgcttcctactatgactgttgaaaggattacatggaacaacttgggtcaaagggcttagcacagtgcctggcttagagaaagcactcagcaagctaagatttcattattattgttgttgtacctcagtttccttccattgtaaatgaagctgattttcacttcctttcaggcaccttaggatccctagcctcaaaatctggagctggggaatctgtccaacccaccttctcactgtgttctctaccctcagctcccagagagggaatttctggggactctaggggatcctcagaggcctgacctgccaccaggaggtggggagagaagacagcacaaaaaatgtgaaagcttcttcagggactgggtgtggtggctcacacctgtaatcccagcactttgggaggccagggcaggaggattacctgaggataggaatttgggaccagcctgggcaacatagtgagaccccatctttacaaaaagctaaaaaaaaaaaaaaagagcttcttcatgccatctctgtggccacatcagcattatccccacacacagatgaggaaactgggactgcactcgctcatttaattccacagacacacccccctgagcacctactgtgtgccaaactgtgccaggccacagggcaggcagaccaggcctctctcccccagggctcatggcccatcagggaagacaggaaatagcaagtcagcccgggaggatttaaatcaagcgccttgcccagcccttcaaagcctcctagagaattttccagcatccctgcctggtgggcggccctgctcccttgctcccttttctcaaaagagaaagcccgaggccagagaggggcgttcccagcctggctggagtcacagcttccgaggggtggtgacagtcttcctgcctttgccccagctggtgtccctgccgggaatactcttctcctggtgggctgccagcagatcctgcccagtgctgggacactgccgggcgtcacttcctctgggaccttcctggctgagagggcaaggcgctgacactcttgctcagcgccagagggtttcctctttcataatgagtttcctactcactaggaaggtctgcgtcccttgagactctgagcttcacgaggggcacaggctttgccatcttcctggcacctctcacctgcccaagcaagatgggaacgaggcgctgctgggtccctttctcaggaagacgcccctacctccgctccaggcgtggatggcactgaaggcctctccctgcatcttctcctgcttcaattctgcacttggtttatggagttatttcttttgatttttcttaagaccttaagtgcttttttttttattcttcttgcccaggctgcagtgcagtggcatgatctcaactcactgcaatctctgccgcctggtttcaagtgattctcctgcctcagccccccaagtagctgggattacaggcacccgccaccacacccagctaatttttgtagttttagtagagacggggtttcaccatgttggccaggctggtctcgaactcctgacctcaggtgatccagccgccttggcctcccaaagtgctaggattacaggcatgagccaccgcactcggccaagtactttatttttttaatttaaatttttgtaaagacagggtcttgctatgttgcccaggctgatctcaaactcctggcctcaagcaatcttcccacttcagcctcccaaagcactgggattacagccatgagccactgtgcccagcctgtggggtcatttcgttgtctaactccctttctagaatgttgtctctgtgaggacaggacttttgtctgtttggggcaccactgtgtccccagtgcctagcatggtgcttggcacataggtgcttaataactatctgtggaaggaagggaagaagagagggagagaggaagaaaagaagaagaggagggagggagaaagaagaagggaaggagacagggaaggggaggttgccatttatttgtccagtttttcatttgttcattccacaaatacttattgagcaccaattgtgtgctagttctggggagagaatggtgccagacacagacacgatcctgccggcaaggcactgactttctggttagtgagaaccagtcaggttcagtggcggaaagtgtggggaggcaaggtaaggtgggcgaggggctgcagacagcatgtcgggggcacctgggccaggctgctggcaggagggctcagctggcagggacaggccccggctccccctacccccagctggcagatgcacagggctgtggtagctgtgggcagcccggttgccaaatgccaccacagctgcgtcactgagagctgggagggccccaaggctgagggggctgggaggggcccccacacccaggctggctccagccccgaagcagatagaactggtcaaaggcctgccccgtgcccactgttccccactctatgtgatgtggctacatggctacttcctgttctggaccattttcaatttgcaaaaaaaaaatggtgcaaaaaatgtgttaaaaataaaatgaaaaagaaagaaatggtacttgagcctctgtacatgttcctacctccaagagagaagttaaccgtggcagtgaccgtgggatgctcctggcatccttctgatctcagcccctccccgccccctccagaggcgacatcatcccgaacctggcatccatgactctgtgtgtgatttcatagtgtaactttcctgggtctactttagtgtgtccctgggcaaatcactcatcttctgtgagcctcagtttcctcaactgcaggatggggataatagtccccacgtcggaagagtcttgaaaattaaatgagtgcgtctgtgtaaagctctttgatgggcacctggcactacataagcattcgccagtgttgctgctggacacccagaacagggggcagacaggtgtcacttgtgtcaagaatataacttttttttttttttttctgagacagagtctcatactattgtccaggttggagtgcagtgatgcaatcacagcccactgaagccatgacctcctgggcttcctgcctcagcctctcaagcagctaaaaccacaggtgtgcaccaccatgtccagccaattttttatagagacaaggtctcgctatgttgcccaagctggtctcgaactcctgagctcaggtgatcctcctgcctcagcctcccaaagtgctgggattagaggcatgagccactgcacttggccaagaacccaacctcttaaacaagctcatgcgcggcggtgccaggattcacaccagtggctggctgcagagtggcattacagaggagctgggtgttagctctggtttattctgtttcacttcctgtcagatttgtctccctgatcagttctgaaaaaccagggtcagtgcctggctggttctctgctgtcacccctgccccagccctggagactccaaggatgggtttgtggagtgaacgaaggggactcagtttcctcatctgtgtgatgggtcttacaggccgtaggaaggcgagagtgcccaatgtgaagtagatgctttataaacccttgtttgtttcttcctcttccagctggacctcctccccctcccccaggtctgggcctggaccccactaccttcagggcagccatcatgctgacagagccctccgaggcagtcagactgggctcgtcactgactcactcattctttcatataatcatatattcatgcacactcgcattcaacaactgttttgagctgtggctcatgcctctaatcccagcactttgggaggccaaggtgggcagatcacttggggccagaagttcaaggcaagcctggccaacatggaagaaccccgtctctacgaaaaatacaagatttagctgggtgtggtggtgggcgcctgtaataccagctacttgggaggctgaggcacgagaattgcttgagaatcgcttgaacttgggaggcagaggttgctgtgagccaagattgtaccactgcactccagcctgggtgacagagtgagatctgtctcaaaaaaaaacacacaaatgttttgagcacccactatgcgccaggctctgctctaggctctggggacatggacgtgaataacacaggccaaaatctctgtcatggtggggctgacacctgtctggggagacaaccatcagacaatggttgtggcactgggtgacccaagtcagagggaagggaggggagggagagggggctgggccttatcctgagggtgatgggggcacatgagttggcagaggccagacttgatatacgttcttcatgcttcactctggccccagcagaagcgtgtgctggagtgaggcttagcacagatagaggtatccgcaaaccctgccgtgtcagacctggtctgagttccctaggaacaggcccatgatgtgggagccggggcttccactgtcccactgtcctcgcaggggatgggatcaggtgtcagcacctccccatggagtacagttgggcaatggccttgggcctgagggctgttcagtcctgtgaccagccaggccccttctgggaatggaaccacaccccaacccccaggcgatgacgtcccaccagggtgttccccacacagttcccaccagccccagatgaaaacaactcaatgctgcatccaccacccaaggcctcatcaaatccaccaggatccatccagacggcagaatattctggagtctcggacaggcaggatggggcggagttttggaccacaggcctggcctgaacctgagttctccagtcactgctgtgtggagttgggaaggtgccttgcttctctgtgcttctgtttccttatcctcaaaatggggatgatgataacaacagaccctcggccaggcatggtggctcccacctgtaatcccagcactttggaggctgaggtgggcggatcacctgaggtcaggagttcaagaccagcctggccaacattgtgaaaacccatctctacaaataattaaaaaaaaaaaaattagctaggcatagtggtgcatgcctgtaatcctagctacttaggaggctgagtgaggcaagagaatagcttgaacctgggaggcagaggttgcagtgagccgagatcaagccactgtactccagcctgggcaacagagcgaaactttgtttcaaaaacaaacaaacaaaacacaacaggcctggcacagtggctcacgcctgtaatcccagcactttgggaggccgaggtgggcagatcacaaggtcaggagttcgaggccaccctggccgacatggtgaaaccccatctctactaaaaatacaaaaattagccgggtgtggtggcgggcgcctgtaatcccagctactcgggaggctgaggcagaagaatcgcttgaacccaggaggcagaggttgtagtgagccaagatcgcaccactgcactccagcctggtgacagagcaagactccacctcaaaaaataaataaataaataaataaataaataaacaaaccacaacagactctcatgataggttcacttcaccctgggttaatgagttaatccatataaagcagcggtctccaacctttttagcaccagggaccggtttcgtggaagacaatctgaaaggggctgggggttgtgtggggggttgtgtgttgtgcatatctctcgtatatgcaatctgcaatagggttcgcacttctctgagaatctaatgatgtgggtgatctgacaggaggcggagttcaggcggtaatgctcgcttgtctgctgctcacctcctgctgtgcagcccggttcctaacaggccacgaatgggtacctgtctccagtccaggagttggggaccccgatataaagcctcagactgtgtctgatacagactaagccctagagaaactttgctgttgctatgattattattgacattattgatattattgacattatcattaggtcgggcacggtggctcacacctgtaatcccagcactttgggaggctgaggcaggaggatcctttgagcccaggagttagaggccggcctgggcaacacagcgagacctcgtctctagaaaaataaaaaaacaaaaaattagctgggtgtggtggcatgcacctgtagtcccagctacacaggaggctgaggcaggaggatcacttgaatctaagaggtcgaggctgcagtgagctatgattgtgccactgcattccaccctgggtgacacagtgagactctgcctcttaaataaataataattaatttaaaaataaaagcattagcagtagtagtagtagtagtagtagtagtagtagtagtagaagtatggattaatccaagggggaaaaaaggagggagtgggactgaggtaaagcaagctgctacttggagaaaaaggtaaagaagatgaccagatagatgcgtgtgtagatgttcacaccatctccagagacccaagagactggcggcagtggtggagggagtggggacctgagggaggggaaaggacaccgactttccaccctttgtccccttccacgctgtttgggttgttcctttttttctgtgcacttgtgtggatattcaaaaccaaacactacagaaagaaattctgcaagaggtttccttccttagcgaaagccccaaatcgtccctctcagccccgccccctcccacccccacatcccggcctgtgggtggcccagtctggtctcccacctctgctggtgttctgcgctcctggccttggagcaggtccgagctggaatgccctgcaagaaagggggctcctcagagtccctcagagtggccctggctctgggcagccaggggtgtggggctttggggaggggggtcccggctgactgatgagaactccaaatgctccccagccccggctgctaatcacttccagattggccgggtcagggccagggccgccgccgcctggctccataaacagcccgtcgctccagatggcggctggctccagcctggcgagcaggttcatgggggactggggggtggcagcaggtggaggacccccacctcactagccgcctcagctgccacacctccacaccgccctgagttggggaccctgggccagaaggggtggcagaaactgaacccattgctcagaggagggaaactgaggcccggaaggggcaacgtgggtggtggtcaaggtggggggaagacagagatgtaaggggggtgctccttgagggttgatgctgggttcactttacctctgtgaatccagcacaccatgaggatgccgtaaagacccgaggagggagggaaggggggcatcattgccagctgggtttaaattctggctccagcttttactccctgagtgaataaattatttccacccccagcctcagttttctcatctgtaaaatggggatggctggagtacaggattgctggaagattcaatgattcggctcctgcagacagtttgcactccacacacggcgcaggcgctgaacacagcttctccctcttccttttccggaaactccttctattcctgcttctcctgccgccggagagcacagtggcctcctccaggaagccaccttgacttttactcagacctctccctttgtgccaggcactgtgcttttcccacagcctctctcacagggtctctcctcgacacaactggcacctgacgctcttgtccttttgaaaacaaggaaacagagggtcagggaagtaactggtacctagtgctgttagggccccgccccttgcagatgaggagacaaagggccagggaggcagtgggatggatatgttgaggtcgccaggaaaagacagcctgatgtgcacctggagctgtctctgaaggtctcacagaacctggcacagcgtcaggtaacccggctgcctctcctgccacacccaccaaccccagagcccacaccttggcacagaaggaagagatccaggctggtgctgggtcgtaatatcccagggaaaggggtaaggagccttgacctgctcccatacctgcctgtctccaaactgggctggatcctggctgggtggccgctgggtggtagccttgtcccaggacacccggcagcaggacaaggtgggggagccagttgctctgtgagttcccctcaggaccatcccttcctgctccgctgagcagagacacagctccccgaggcctgagtccccatttttcaccatctttatcctcgttcctggcacagaaaagcctcagtatcactttgtcgaatgtggtattgagtgcatgggtgaggcactcctccaagcaacttactacagtaactttttaaatgtttacatagccctctgagaaggggactattattattgcccgttcacagatgaggaaatggaggctcagagaggttaagtgacttactggaagtcacacagctggagctaggatttgaactcaggtctcctagctccagcgtgcacattcttgcccacatgtctctgctcccagggtagcagtgagcctgaaatacgtgcagtgcctggcaggtagtaggtgcttttccaagcccttcttttgcttcactcagccttgaggtcagcggcccgttctgccctgtgcctgggaggaatgttcgtggtggccccagcctggatccgagaagaaaggcagccttgtgggcgaaaggtgagcggctgggtgggcgcgggcgtgtttatccagggccggcgtgtggctcggggtggcgccgctgtcagccgcgccggctgccccaggcctgtgctggcctccagatgtgagctggctccagccggccgggcccccccaccccacgcacagaggggctttatcaaaagcggctgtgaggaggcccaggaggccgcctggctccagcctgctggctctgagccccgggcctgcagaagccaggccagtcgcacttgtgctcttgtgccctggtcttcgtgtgctccacggcccagctcctctgttctcctcgagtcccctgggggcccaggcgagggacagcccctttgccaggaaactgaagctgcaggagcagtccgggaggggtaacaatgccagaaccctcctgcagcgtttatttttctgcattccaggggggtagaggtaacccacacggaacaaaagtgcaaaattcatcaaaattcagagagtgctcagtgagacatcaaagtgtagacactcgtgggaaggagaaattgcagattcagagagccagttcttagcggggaggagagtaactggggttggggggtttgcaggggctatgttttctctgcggtattttcttttttaggtgggggtgggggtgttattctttttctttttcttctttggagacaggatctcgctttgtcatccaggctggagtgcagtggcgccatcgctggctcactgcagcccttgacctactgggctccagcagtcctcccacctcagcctcgcgagtggctgggactccgggcacgcaccaccacgcccagataattttttaaaaatagagacagggttttgccatgttgcccaggctggtcttgaactcctgagttcaagcaatcctcctgccttggcctcccaaagtgctaggattacaggcgggagccaccacgcctggcctccagggatgctattctgtatattttattcagtggcctgaactattttgtaataataaatcataataactgggaaaaaaaacagagaaaaaacctgagacatccacctgctcccgaccctcagccctactcctgttaaaaatggcttctaatgctttctagagattgtctgaacacccacaagaaaatccacatacattctctgtcctcttttgtttttggttttataaatagtatcaaaatatagtctgagcacagtggctcacgcctataaacccagcactttgggaggccaaggtggacggatcccctgaggtcaggagtttgagaccagcctggccaacatggtgaaaacccatctctactaaaaatgcaaaaattagtcgggcatggtggtgagcacctgtaatcccagctgcttgggaggctgaggcaggataattgcttgaacccgagaggtggaggctgcagtaagctgagatcacgccactgcattccagacagaatgagactctatctcaaaaaaaaaaaaaaacaaaaatgctgctctgcacctggcttttttcacttagcagtatactccggccctctctgcaactgtccttgtttgcagctgtgtggtattccaccatgggaatgcaccacgtccagttttccaggcccctgttgatgatgatgtaggttgctgcctgaggttcactactacagaccacactgactacgggcacccggtgtccgagtcttcgaggactcaggcaggtgctgtctagactctgatggtcaattcttagaggtagagctgtgcagggtagacacttttcctcttctgagagccattgctaatttgctttccccaaagtgtgtgtccctgtgttgtcccaccagcactgcggctgaaagggaaactgaggcacagggacagttggctgttcagaagggtgagagaaaacagcttcataaggaatctctactaaaacaacatgctttctcggtttcgtttctttctgattgcaaaagtgaaacatgtccattgaacaaactttagaaaatacagagaattgcaaagttagaaaagaaggcctcctccctcctccccacatacctacctctagtggctggacaaagacgagggtttgggccgcagggcaagctgcctggtgtccttgctatccccatgcctgacttgctgtgtggccccaggcaagtctcagcctctctggacccctgtgtcctcatctgtaactgggaatccaagggtgccagactcgaaaggctgttgtaaggatcaggtgagatcacgtgggtacaggagtggcccagcacaaaaggtttcataagaggaggctatgataggtcttcctcctgcccctccgcttgtgcggctgaatccaggatttttcccttgacttgccccgcacagtgaggcctggcattttcttcccgctccccatgctggcacgtgacacagccccgggcacatgggaggaacgtgataaatgctaatggatggcccgggaacgccctgtcctccaccaaggtcctgaagtctgagcagtggttggtgacggaagacctggatgcgaaaagccgaccaccagagtcaagacccagagaaaacagcaggtgcctgaggcaaggaagccgggattcccagactctggcagcctggccccagctgtcccagagggcaccccgccagcccctgggtccactccacccagggtccagccctgactgcgccaatggcagcaaagatggcagggaccccaagggcaacttcccaaccaccagcagcatttagggagcaccaactgtgtaccccactctggactgggcagcatagagattgtaccgcagtgaattcctggggaccaggggtggtgacttcattgtcttcctgtccctagagcccagcactggctactcatggattcaaacatttatggtgcacctactgtgtaccagtgactatgctgagtgcatctgcctgccaagagagggaatttctggaccatatatttagggaggggaggaagacagtgcactttctttttttttttttaatcttttgttgttgttgttgttgagatggagtctcactttgtcgcccaggctggagtgcagtggcacaatctcggctcactgcaacctctgcctcctgggttcaagtgattctcctgcctcagcctccaaagtagctgggattacaggcgcctgccaacatgcttggctaatttttatgtttttagtagagacagggtttctccatgttgaccaggccagtctcgaactcctgacctcaggtgatccacccgcctcggccccccaaagtgctgggattacagatgtgagccgccacgcccggccgagagtgcacttttctatcaaagttttttttttttttttttttaactgaaagcagtcttttcgtaagtaaataaacataaagaattcccaagttaagccgggagcggtggctcatccctgtaattctagcgctttgggaggccaagatgggaggattgcttgagcctgggagtttgagaccagcctgggcaacatagagagacaccatctctacaaaaaaaatcaaaacattagctgggtatggtggcgcctgtctgaagtcccagttactcgggaggctcaagtgggagagttgcttgagcctgggaggtcgaggctgtagtgagctgtgattgcaccattccagcttaagccacagagcgagaccctgtctttaaaaaaataaaaaattcccaagttagaaaaaaagacaaccctaccacctaccagtgataggaggaagttcgggggccttgggagcgccagaggaagcacctgacatagactgtagggccaggagaggcttccaggaggaagtgagttccaggcaacgaccccaggaagcatgagagggaagttgggtggagggaaataggcctttgggaggccgctgcccaggcctggcaaggcaggctgggtgactgggtgctgatggtctcacccatcccagcccagccgaaggtgagggctctgtccgatgcttcttggcagagcttattgcagttgtaacgaaagcatcacttctgtaattatgtttctgtcttcctccctcccaccccacctctgaactggagctctatgagggcagagcccgtcctgtctgcctcatccaccatactgtcccctgggcctggagcacacagtaggtgcttatggtggatgaccttctgttcccctgaagttcatgtctaccaggaacctcagaatgtgaccatatttggaagtaggggcattggctgattaattagatagggatctccagataagatcacactggagttgcggtgggcccgaagtccaatgcctggtggccttgtaagaagaggagtgggaaggccaggcatggtggctcacacctgtagtcccagcactttgggaggctgaggctggtggatcacttgaggccaggagttcgagactagcctggccaacatggtgaaagcccatctctactgaaaatacaaaaattacctgggcgtggtgttgcacacctgtaattccaggtactcgggaggctgaggcaagcgaatcacttgaacctgggaggcggaggctgcagtgagtcatgatcacgccactgcactccagcctgggtgacagagcaagactctgtctcaaaaaaaaaaaaaaaaaaaaaagaagaagaagaagaagaggaggaggatacacagagaggcacagaggagaaggccgtgtgaagacagaggcaggaactggagagatgcggccacaagcccaggggtgccgaggaaccctggggaacaccaggagctggaataaggtgaaggcgggtaattgcccggagccttcagaggggcgcaccctgctgatgccctgacttcagacttctggcctccagaactgtgggaggacatatttctctgtctctctctctcctttttttttttttttttttgagacagagtcgcccaggctggaggcgcctcctcccgggttcacgccattcacgccattctcctgcctcagcctcctgagtagctgggactacaggcgcccgccaccacgcccagctaatttttttcgtatttttagtagagacggggtttcaccatgttagccaggatggtctcgatctcctgacctcgtgatccgcccgccttggcttcccaaagtgctgggattacaggcgtgagccaccgcgcccggcctttttttttttttttttttttttgagacatggtcttgctttgtcgcccaggctggagtgcattggtgcaatctcagctcactgcagcctcgacctctccaggctcaagtgatcctcccacctcagccttcctagtagctggggctccagacacgaaccaccacgcccagctgatttttgtattttttgtagagatgggggtctcgccatgttgcccaggctaatacttctctttttctaagccaccacgtttatggcagccctggaagactcgttcggattttgctgtgtgaataaatgtgtgaatgaatgaatgaatgagagaaggaatgaatggagagctcctttgagttgtgcagggcccgcggggtgtggccagatgtctgcctaagggccatagggagctatggcagggtcccagccgggagctggttgggtcttcctagtagctgggactccagacatgcaccaccacgcccagctgatttttgtattttttgtagagatggggtctcgccatgttgcccgggctgatacttctctttttctaagccaccacgtttgtggcggccctggaagactcgtttcggggcatttcagggctgttgttcaggctgtgttgggggctggatgctgtccagccagtgaggtgggggctgtgaagagctgttgagggcccggcctcaaggaggtaaccaggaaatcaggttctgtggaacccctaatcccagaagcccatgtccacacccaacgtggacacccacagccgagatttcgggggtctctccccttctggtgccttgcagataagttagagccaatgtttatccccgagttctgaatgcacctcagaaggtccacccaagtgagtctcatcaccttcggctacagcccagagctcaggcagttgggagggaagttctccacctgtctgcccttcgtccctcttgctgtgactctggaagtcgggaggcagcaggatgcaggggaaagagcctagatcctgactctgcccagtgactggagtgactgttcctcactaagccccattttccccatctgtaattggggaaaagtcatctggctttgtagaagctgttgtggagagtggaggccaacatgggctggcagaacacccagcacatagtaggtgcttcctaggagaagtgggccctgggtcccctctccaggcacagccctgagtcttaaagggagactctggctttcccaacctcagatcttttgaaagccctgacaccttccctgtggcctgtccagtggccccacaaggccaccctatcccccaaggagcttgacaacctcggagggagtaagacttgaatttcatgctcataaaatgactggaatcaaagcagggcttatgacatggagctgttttgaagttggcccagggcaggaggggcgtgaaattcctggctgttttggcccctcttcagagaaactggggcccctggcaggatgtctggggcccaggcaggaggttaatggctggctacctgaggtacctgccattttagcaatgatccaaatgccaacatagacttttggggaaaaaattctaagttttagagaagacaaatgggaaaactcaattgaaaaccccccccttatctggggctggagacggtgaggacccaatggttgcagtgtgggaacttgggccctgtagctaggcttcccatccctgccttgccacttacttgctgtgtgacgttgggcatattgcctagcctctctgtgcctcagtttccttctctgttgagtgggcctaataccagtcctttcgtcaaaggcttgtggtgagggtgaccacattgacgtctcctgccctgctggcccagtctctgggcatcacaagctcagtcactgatgctgttactagcattttttttttttttgagatggggtcttgctatgttgcccaggctggtcttaaactcctgacctcaagtgaacctcccaccttagcctcccaaagtgctgggattataggtgtgagccactgcacctggaccagttaccagtatttttcctatagatatgaacagcttctcctgaattgagggctacctgtgaaccagccccttcataggcctcctctcaccaaatcttcctacagctgcatgaggcaagccatgcaccccccgaggcagatgatcagtgatgtctggacacttgcccggggcacacagccggtgagaggcagggccagaattccagcgccagtccttctggtggctcagtccacattcttggtcactttcctttaggaaatacggaaaggcgaggagaggaaagatatgtccccacacccatacagggagagcagggttgcttttctttgattttttttttttttttgagtcagggtcttgctctgttgcccagactggagtatagtggcatgatcatagctcactgcagcctcgaattcctggactcaagtgatcctctgatcctcccacctcagcctcccaaagtgctgagattacaggcgtgagccaccgtgcctcatgagaacagggtttctcaatgtcggccacattctgggcccagtgtgtctctgcgtgggggctgcctgtcctgtccaccgtgggatgcttagcagcatcctgggcttctgcctacagattgggaggccccccagagtgtgacaacccaaaatgtctcctccacgtgtcccagagaggggcaacccctgcctgagaactgggctggagtactggggttgaaatggtggagtgttttcttctggattttttctctaactacacacactggggaaatacagacacacactggggaaaacaggcatttcattgcatgccttgcattttctctttattttttaatttttaaaaatgtttgtcgacctggcccagacgtggtggctcacacctgcaatcccagtgctttgggagacagaggcaggcagatcatctgaggtcaggagtttgagaccagcctggccagcgtggcgaaactccttctctactaaaaatacaaaaattagccaggcttggtggtgcgtgcctataatcccagctacttgggaggctgaggcaggataatcacttgagaggtggaggttgcagtgagccgagatcgcgccactgcactccagcctgggcgacagagcaagactccgtctcaaaacaacaacaacaacaacgacgtttgttgacctgtcagcaggaagaaattttaaaattgtttatttatttacatacctatttagcattttctcataaaaaatacagctgggtgacatcacacatgcattgaacttaggcgaatccatgttcttgggctgggatgaaggagagagagcagtaccatgagtgataatggggtgatgctggcatccgtgacctgagccaggagctgtcacaggtccattggctggggctttcccctgtctttgcccttgtacagatggggaaactgaggctcagagactggacagggttccagaattccaggggtaaacctctggaacccagtgtggctccataaccagggctgcagatgtcgtcccctctgggtcaggccccccggtggctcctcagggtaccccctgtctggaccacttctgcaccaggggcccccaagagcaggataaggaatcaagaggggttgagcaggtgggaaggaagtgaggggttgggcccagtggcttacgcctttaatcccagcactttgggaggccaagacggaggactacctgagctcaggagttcaagaccagcctggacaacacagcaagaccccatctctacaaaaaatgcaaaattagccaggcatggtggcatgagcctgtggtctcagctacttgggaggctgaggtgggagcatcacttgggcccgggaggtcgaggctgcagtgagcagtgatcacgccactgcactccagcctgggcaacagagcaagacccccatttttttttcttcagatggagtcttactctgccacccaggctggagtgcagtggggcgatctcggctcactgcaacctccacctcttgggttcaagcgattctcctgcctcagcctcccgagtagctgggattacaggcgtgcaccaccaggcctggctaatttttgtttttttagtagggacggagtttcaccatgttggccaggctggtctcaaattcctgacctcatgtgatctgcctgcctcagcctcccaaagtgctgggactacaggcgtgagctactcaggaggctgaggcaggagagtggcgtgaaccggggaggcggagcttgcagtgagctgagatcgcgccactgcactccagcctgggcgacagagcgagactctgtctcaaaaaataaattaataaaaaataaatttttaaaggaagggagagaggcagggtgagaggaagaggccctgcacccgccgtcccctgcagcagccactgcagggaggactctgctgaaggaggcccaggggctgcagggccagggcccaaggctgacagctccctcccaggcacacacagaggggccgctcattcccattacacaaataaggacacccctgatgtgggagagtgatggctcccaggttgtctacccaagtgggccatgtctgcaggaggcggacctttcgctaatctgaacaaaggcctccctttctccttccatccagaggtggggttgtttgcctaaagtcacacagcagtaaatcacgggctgggatttaaatacagactgcctgctcaggaatccttgttttacccattcagtatcttatatggcttgtggacatgcatatgtgtgtttggacacacacctacacacccccacacacacacaaacacgcacacacacagtggcagctgctcccccagactcaagaacccctgcatctgtctccagggccctccgagacctggggccgcaacagttgtgtctggtttgcagcccagctgagagcggataatcccaaatctctcagactccattccagcccccatcagcccactccccagctgtgcatctttgggcaaatggagcccctctctgagcctcagggtctttgccaccccagcacccccgcacaccaggactttactaggggttctgtgagctgaggctgctttgtgatttatctgagcagagcttcagtgggacacagagaccaccacacgcagctggtgtccatgcagcctggccggctggtagggctcagtggcctcccagggtccctgtttggccaggcttcagggtctggtgtgtatgatttcataggaagcaatgaccttgggcaaaaatgtcacagggcatcagcctaatggattcggcctggctgacagtgagcaggagggttggagtcctcctcctggggctgggttcttcagggtgggggaactcagggatctgggtcattgcctgtggtcagggtgaggagacagaggcccaggggccagcagccttcccagggtcacccagcactgcctgacctcttccaccaccttggggcctttgggaaggacagggtcggtgggggtagaggaacctgcaggggccaacagaccttctcctggcaagtcattgatgcctcagtttcctcttctgtaagatcggtttgattaatagttccgatctcagggctgggggagagtccatgaattgctttataatgagctcagcatagagaaggtgctcattacgtctttttttttttttttctttttgagatggagtctcactttgttgcccaggctggagtgcagtggtgcgatcttggctcactacaacctctgcctcccagattcaagcgattctccttcctcagcctcctgagtagctgggattacaggcatgcgccaccacacccggctaacttttgtatttttagtagagatggggtttcgccatgttggccaggctgatctcaaactcctgaccttaggtgatctgcctgtcttggcctcccaaagtgctgggattacaggcgtgagccactgcgcccggccgctcgttaagtcttgactgtcattcttggtttgcctcacatctctgaccccatctggaacgctctgtacttagcactggttgctgggtgctgccagtcctgggttcagatcccagctctggtgggtcaccctgagctagtgacagagactcttggagcctcagtgtcctcatctgtgaaatggggccaccaacactaccaaggaatggttgggagcaaagtgagatggtggctgtgaggcacttcaggcacctcagctcatcagggtaagtaaagtcctctgttgaccttgccaggctagaagtagctaatttatcgtcatggtgggtggcagaggggcagctaaggccactggctcaaggtcacagggatcagagtggaatctcactttgtggctcaaagctgtgtgatcttgggcaagccacttggcctttctgggcctcagtttcatcctgttgacatcagaagaccccaggaccatacagtggagggctgagtgtaacttggcatccagtcagtgatgtgttttgcacccaatgcctggcacagtgctgcacccaccaggagaggtgggagggtgatggctcccaggtcgtctgcccaggtgggccgtgcctgccggaggggagacttttcctaatctgaacaaaggcctcctttcttccatccacaccctccctgggagtacagcctcacaccttaaactccatttccacaggggccactctggtgcctgtccccaggtcactctggactggccagcctccttgagcccctgatctgagggtctcacaggcatcgtagtttaacacactcccacccagcaccggaaggcccccacaaactggctcttcctgagcctcccctgggctaggccaaaacctgggagtcccccagctcctttccccctcttaccctctcacttctgagtcctgtgggctccctggtctgagcgttctgcattgcatggaagtctaagaggccacaggaaaggcatgcattccggaatcaaggaaatgcgggagctggagtctcattctgttgctatgttgctcaggctggtcttgaactcctggcctcaagtgatcctctcacctcggcctcccaaagtgctggcattataggcacgagccactgtgcccggccactgatcagttcttacctcttctggaacaccaggtccagtgccatcctctgcccctctggtctactgcagtcaactgcctgcttccagcaatgccccgtggtctgttctctgcaggaagctagagggaagctagaggtaaaaacctggagcacatgcgtccctcctctgcaatggttcccatctcccttggagaaaaagatggatctttgaaaggccctgtaggatctgccccaccactacccctcccccaccccatctcctaagcctcctcctccctccctgaccctgtactctgctccagccacactggcctcctggttgtttctccaacaaattaggcatgctcctgcctcacggcatttgcactggctgcttcctctgcaggacacattcttcccccagatgtccacatgcctcactccctcacctcctgcaggtctttgctcaaatgccacttctcaagcatcaggcacctgcccccattccaattttcaatggcacctctgccccaccccatcccctatccccctccctgccttgtttccctctatagcatttatcaccatctcatcttctacatggtttactttttcatctgtttactgtttctccctagtcctttgccctgactgtcaccattcccagaacatccatttcacgagggccgcgttttctgactattttgttccccgctgtgtctgctgggcctagggcagtgctgggcacacggtagctgctcattaaatatctgtggaatgggcagctctggagtgtggataccaacatgcccctggtgaagcgggagctctaggatttggaatcagcctgtaagctgtagagggcagtgccctttggatggcacagccaggtaggcatgttcccagcaggggtttgtgggaaacggctgtggagggtcctggtgtctacagtcagattcccagggcaggatgctgacagatgggccatggcacgatggggaggccaggtggtgtggctgggtccggctttaagcctctggccaccgtgtcaggtttgtaaagcaaagggtcaggaaggcaccaagggcagtgtggccggaagtgaacggcccaggcttctgggaagaaaaagaattacattccaaggaacccatggcttgggcgcctgagccactgggggcagggaagagtatgaaagaggcagggctggcgtgggcagatggtggccttgcctgaggttcagagtggtcaggtctgtaggtcagggtgaccctggagagctgggatttggaccaggtcaggggaagtgtcccccagattgtgaatggctggggcgtggcagccagtccacagctcctgctgctgttgggaggggagacccccactctgggctggggtgcagctcagggagccccggagctgactgagccacttccttgtgccaggcggtgtccatgtccacccccagggcgagatgtgggcaaccaagccaagagagggggctgccaaggccacaagctcatccatgtgtccatttatccatctgtccatttatccatctgtccatttatccatctgtttacagagtgtctattgcatgccatgtgctgcagactcttttttgagacagagtctagctctgttacccaggctggagtgtagtggcatgatctcggctcagtgcaacctccacctcccaggttcaagcgattctcctgcctcagcctcctgagtagctgggattacaggtgcccaccaccatgctcagctaatttttgcatttttagtagagacagggtttcgccatgttggccaggctggtctcgaactcctgacctcaggtgatccacctgcctcggcctcccaaagtgctgggatcacaggtgtgagccactgcgcccagcccctgtgctgtggacttaatgtgataatgtgacttgcatcttaccgcccagggcctctgctcttgctgttctcttggcctggaacaatacctaccagactccagggctggcagctcctcctcacttggggtcacctcctccaagaggccccctgcccactgctgcctgcctgccctctgttcctttacttgggtatgtgctgaacgcctggaaaagaacctagtgcatttccttctttgtctgttgtctaactcccccattcaaatatcagctccacgaagggagggttttgtctcatcactgcatgtccctacacacggtatttggcacacagtaaacactcaatgaatgcttgttgaatgaatgaatggacaaatgaacaaatggaagctctactggggaagctcagggatggagactggctcctaacccagagggaggggatgtcctgggtagcgcagtcctggaagatgcagtcactggtaaactgaagcctaaagaagctcaggcaggcaggtgaagaaaccagggggatggttttgtttcaaaacaccttcctccaagggaggaagaggtgagctacctccaaggttgctcagaggtggaaactgtgattaaaaataaaaaaggcggccaggcatggtggctcatgcctgtaatctcagcactttgggaggccaaggtgggcggatcacctgaggtcaggagtttgagaccagcctgggcaatatggtgaaaccccatctctactaaaaatacaaaaagtagccgggtgtggtggtgcacacctgtagtcccagctacttgggaggctgaggtagaagaatcgcttgaacccgggaggtggaggtagcagagagccgagatagcgccactggactttagcctggcgacagagcaagactccatctcaaaataaataaataaacaaataaggctagaagtggtggctcacgcctgtaattccagcactttgggaggccaagacgggaggatcgcttgaggccaagggttcaagaccagcctgggcaatataatgagaccctggctctacaaaaacaaacaaagcctttaattcattgctaccataaaaatcgagacatttcactacatcctgatgtccctgtctctcttgaagacttggaagatttggccatgtgggccagcattctagaggcaaaggtggtcagtcctgtgttctccacagcccctatcaggtccttgaggtatgtgagcttcaaagccttgtattcacagcatgacccccactacccccacctgctgggtgaccttggacaaccctttctgagtctcagctggtccttggcaaaaaatgggttggaggccaggcatggtggcttacgcctgtaatcccagcactttaggaggccaaggcaggaagatcacttgagcccaggagtttgagaccagccggggcaacacagcgagaccctgtctctactaaaaaaaattttttttttttgagactgagtctcgctcagtcacccaggctgccgtgcggtggcgtgatctcagctcactgcaagctcgcctcccgggttcacgccattctcctgcctcagcctcctgagtagctgggactacaggcacccgccaccacgtccggctaattaaaaaaaaaaatattttttaattggccagtggcctgcacctgtagtcccagctactcaggaggctgaggcaggaggattgcttgaggaggaggttgaggctgcaatgagacttgatcatgccactgcaccccagcctgggtgacagagtgagaccctgtctctaaatgaataaataattagttgggcgtggtggcgcccacttgtagtcccagctacccgggaggctgaggaaggagaatcgcttgaggccaggagttggaggctgcagtgacccgtgatcgcatcactgcactccagcctgggcgacaagagaccctgtcgcaaaaaaaaaaaaaaaaaagaaagaaagaaagaaagaaaaagggttggaagcgcactgggggaaaaagcttgcccactccgctttgggagcctccagcaggctcccgctgtgccaaaggcacacacccagatgtccggtggtccacccctgccccggcggtcacgcctgtcccctcctccagccccagcctcgggtcggctgagagatgacgcgtggcccggcccagccggagcgttggtccctagagcgctagcgccctctgctggccaagggcgggcgtgcaggcccgagccagaacggggaagccgggcgccaggagagcggggaggagcttcactcttctggtcggtgagatggggaagagcaatagcgaatacataagcagaatacaccgaaaggaaaggaaagaacaatagcgaaataacatttacggaggggtgctccgtgccgaggactgcaagaagcccacaccatgtaaaaccacacgtaatccttagaataacccggcgaaatggcaacggaaacgcacagagaggttaaggagccctcccggggccacacagctggtagtggaaacggctgactcctgggcctgcactggcatccaccgaggcggagagaggatgtgaaggtgtcacctccgctcattcactcatgcatggccttccagccagccattcacccattcacaagtattcactgaacacctactgtatgcccaacattgtgtgagatggcaggaacacagccgtgaacacaattggcctcatccctaccctcttgaagctgacattttagtgggggtgggagggggcagataataaacatgaatatatcattaacagctgggccagaggccaaaggataaacctgtatgcgctcgctgatgttactcaggctcctaccccaacatgattttttgccgcatctgagccctacctgtacttttacttgacatttgctcctagataattggtttttacttaagtgtatatatatatgtgtatatctatatctatatctatatctatgtatatgtttatttatttattgagacagagtctcgccgtgttgcccaggctggagtgcagtggcacaatcacggcccactgcaacctccacctcttgggctcaagcgatcctcccacctcagcctcccgagtagctgggactacaggtgtgcaacaccatgcccagctaatttttgtattttttgtagagagggggttttgccgtgttgcccaggctggtctcaaactcctggactcaagtgatctgcccaccttggcttcccagagtgctgggattacaggcatgaaccactgtgccaagacaaagttgctgggttttttttgttgtttgtttgttttttgagatgcagtctcactctgtctcccaggctggagtgcagtggcacaatctcggctcactgcaacctccgtcttccagattcaagtgattctcctgcctcagcctccctagtagctgggattacaggcacgcaccaccatggccagctaatttttgtatttttagtagagtcggggtttcaccatgttggccaggctggtctcaaactccttgacctcaagtgatctgcccacctgggcctccctaagtgctgggattacaggcatgagccaccgtgcccgcctgccgaagggtatttttaaaagggaatttcggcatggtgaaactctgtctctactaaaaatataaaaattagccgggcatggtgttgcgcacctgtagtcccagctacttgggaggctgaggtgggagaatcgcttgaacatgggaggcagaggctgcagtgagccgagatcgcgccactgcactctggcctgggccacagagcgagactccatctcaaaaaaaaaaaagggggggtggtgggaaatctcatatcaccacacctacccaaccagtatcagttgtcacctatcagacagcatcctggactgagggtgaggtattgacatcactgttatattaatcaatgtccttggcatgccacatcagttcccctggttcctggcaggggcactagaatctcccactgggaaccccaagatgaagccagccccagggccaggcctagggaatgaaggtgccatcagcttctgaagaaggtgggtggcctctccaggatcctccaagccactgtggcctgtgctttctctggattctgctggtgaccctgaagaatctgaggcacaggccttccctggccaatcagaaagcagtggcttccatcttagcttcctgcccaccatggacaaccctgggtcgtggaacccccgtctgctctctttcatggctggcaatgggtgtaagggggacttgctcagatctgattctcaaaattcctgccagggaaggccaggcttctgagccagtccatctgttgccccctgacccagccacccagcttccctgcatgcagggcagagggaacaggaggccccacggggccactgggacccctcccttgtcactgccagtggcctcacaggtccatgtgacccaccaagagaggaaggccaggcccagccctgaggagtgattcattcattcagtttacacagtcagactttgtgctggacactgtttgttgttgttgttgttttgttctttgagacagggtctcactctgtcacccaggctggagtgcaatggtgtgatcttggctccatgcaacctccgcctcccgagttcaagtgattctcctgcctcagcctccggagtagctggtattacaggtgtgcaccaccacgcctggctaatttttgtatttttagtagagacggggtttcactatgttggccaggctggtcatgaactcctggcttcagtgatcctcccacctcacctcccaaagtgttgggattacggacttaagccaccgtgcccggcctagacaccattttttattttatttacttatttatttattattattattattattattattttgagacagagttttgctcttgtctcccaggctggagtgcaatggcgcgatctcggttcactgcaacatccgcctcctgtgtccaagtcattctcctgcctcagcctcctgagtagctgggattacaggcacctaccaccacacccagctaattttttgtatttttagtagagacagggtttcaccatgatgatcaggctggtcttgaactcctgacctcaagtgatgcacccgcctctgcctcccaaagtgctgggattataggcgtaagccaccacgccaggcctattattattatattttgagacagagtctggctctgtcacgcaggctggtacaatggcttgatcttggctcactgcaacctccgctacccaggttcaagtgattctcctgtctcagcctcccgagttgctgggattacaagcacgtgccactacgcccagctaatttttgtattgttagtagagatggggtttcaccatgttggccaggctggtctcgaactcctgatctcaggtgatccacccaccttggcctcccaaaatgctgggattacaggcgtgagccactgtgcccagccttcaacactatttttaacactgggttcatggcagtgaagaagccagatgaggcgcccacctgcaagagggacaaaggaataactactgcaatgaatgagatagttaaaatacactgggcatgggagtccaaggcgggtggatcatttgaggtcaggagttcgagaccagcctggccaacatggtgaaaccccgtctaccaaaaatacaaaaattagccgggcgtggtggtgcacgcctgtaatccccagctactcggtaggctgatgcaggagaatcgcttgaaccagggatgcagaagctgcagtgagctgggatcgcagcactgcactccagcctgggtgacagagtgagattctatctaaaaaaagaaaagaaaaagaaaaaaaaaagaggccagctgcagtggttcacgtctgtcatcccagcactttaggagtccaaggcaggcggatcgcctgagttcaggaattcgagaccagtctgaccaacatgatgaaactccatctctactaaaaatacaaaaattagccgggcatggtggcaggcgcctgtaatcccagctactcgggaggctgaggcaggagaatcacttgaacccaggaggcgtaggttgcagtgagccaggatagtgccattgcactccagtctgggcaacagagtgagactctgtctcaaaaataaaataaataaaataaaataataaaataaaataaaatataaaataaataaataaattaattaattaaaataaataaaataaaataaaatatgcctgtatccttggatggagaaacctgctcctagaactgtgttctacagaggtatgcaaatgcacacacatgccctgaggccagcgggcagcagagcagcagagaccacctcaggcccagcagtccaggcctggccaccgtggtggtggcccttcatgtgctgggtgtgctgcgcttaactacggagcggatccccaaggctgctctgcagggcactgggaagaatatcccggggaggagctaagtggagatcacattcccatttgcgtaaaaaagtgggggaagtgcatgaggggagggggaaagaatgcggagtggtgctggctgcacttgcgtttgctcgcgtgctgcctgtgccatctcagaggctcacacactggtgcttgccttgggagaacggggtcagaggtgagactttgccctgcactctattccctttattttctttttgagacggagtctcactgtgtcacccaggctggagtgcggtggtgcaagcccagttcactgcagcctccatctcccaggttcaagcgattctcctgcctcagcctcccgagtagctgggattacaggcgtctgccaccatgcctggctaatttttgtatttttagtagagacggagtttcatcatattggtcagactggtctcgaactcctgaactcaggtgatctgcccgcctcggcctcctaaagtgctgggatgacagacgtgaaccactgcacccggcctctttttttgtttgtttttcttttctttgtttagacagaatctcactctgtcacccaggctggagtgcagtggtgtgatcccagctcactgcagcttctgcatccctggttcaagcaattctcctgcctcagcctaccgagtagctgggattacaggcgtgcaccaccatgcccggctaatttttatatttttggtagacggggtttcaccatgttgcccagcctggtctcaaacttgttggctcaacggatctgccagccttggcctccgaaagtgctaagattataggcatgagccactgcctctggccaactctgttaattgacacataaatgtagggagacttcacgtacaaatctgccttcacagcttccttggaaaatcagaaagatctggcattcactcagcccatgtgcccagtacttagtaacaccttcacactcacctgtccccacccagctgcataacatcagacacatatcagaaccccaaggatgtggcccgtgtcttcttctcacagtgacagggccaccagcagcaatgaggtggctctagcctaaggtctcctctctcccaaggtcaccttggcccgtgtgtgacagctgactgcatctagcaggtgaccttgcccaggtctcacaaggaagtctttgaggttgatctgttatcttctggagctcagagctctgtacaatccacccaccccagcagcttgtttcttgcaaactggaaagaatgaagctttcacaagctgcctttttttttttttttttttgagactgagtttcactcttgttgcccagactagagtacaatggcgtgatctcggctcgccacaacctccacctcccaggttcaagtgattctcctgcctcagcctcctgagtagctgggattacaggcatgtgccaccacacccagctaattttgtatttttagtagagatgggatttctccgtgttggtcaggctggtctcaaactcccgacctcaggtgatctgcctgccttggcctcccaaagtgctgggattacaggcgtgagccactgagcccagccaagctgcctcttcttaaaggaatttcctcctctgccaagtaaggaaatccctaatgctgtatcttgaactttgtcatgaggctccgtgatgaaggagtgacgtcaagaagggacaggccaagagagggaatgtgactgtccctgggctccctaaggttctctgaggggaggtgcaagaggccaggcaggggccgggtgcggtggctcatgcctgcaatcccagcactttgggaggccgaggcgggcggatcacctaaggttgggagttcgagaccagcctgaccaacatggagaaaccccgtctctaataaaaatacaaaattagccaggcatggtggtgcatgcctgtaatctcagctactcgggaggctgaggcaggagaatatcttgaacccaggacgcagaggttgcagtgagccgagatcatgccattgtactccagcctgggcaacaagattgaaactccgtctaaaaaaaaaggccaagcagggatccacaggcagggtggaaaggggcacagaggcaggggccgctccgtttatgtgacgccatccacatcgttatgcaacaccacagctaaaggtgcagtacagccaacagtgctcccacccagagggccggagaactttctccagtggagatgcagtccaaggaactggctcttgccccaagaccagagtcagtcagagatccagggcagtggggccccatggctggcttgctgttggtcagccagaaggggtgctttctacacctgctgtctccccgacctttgtcaggtaacgacagatgtttccccacaccacaagtttccacacagtgaaaattaccagtggatgcatcccctccggtacacaaacctggcaggggctggagaccagaggtgtgacccagggaaaccacctggcaaaagtggcaacatctggccaggcgcggtggctcacggcactttgggaggctgaggggggcagatcatctgaggtcaggagttcaagaccagcctggccaacatggtaaaaccctgtctctactaaaaatacaaaaaattagtttggcgtggtggcgcatgcctgtagtcccagctactcagaaagctgaggcagaattgcttgaatccaagaggtggaggttgcagtgagccaagaccactccactgcactccaacttgggcgacagagagagattccgtctcggaaaaaaaacaaaaacaaaaacgtggcaacatctgaacctcagacaagcacttcctgtgtgccctaggcttaaactctgtccataaactttagaccatctgtaaacccaccaccaaggaagagcaaattacacaaacgtgggacacagtgcccacaagatcacagatccaaacaactgtctcagagggttttgagtgttgtttcacaggccttaagcccaggtccacccagcccgcatcccctctggtatataaacctggcaggggctggggaccggaggtgtgacccagggaagccaggtaaagtgcacactctaggatttgagacaggatttgttttcctcttgggggtaactcagcacagaagaggccacctttagatttaaccacgaatttgttctggggttttccagcagcattttattatttatttattttttgagacggagtctcactctgtcgcccaggctggagtgcagtggcacgatcttggctcactgcaagctccacctcccgggttcacgtcattctcctgcctcagcctccggcgtagctgggactacaggtgcccgccaccacgcccggctaattttttgtatttttagtagagatggggtttcactgtgttagccaggatggtctcgatctcctgacctcgtgatccaccagcctcagcctcccaaagtgctgggattacgggtgtgagccaccgcgcccggccattttattttttagagacagggtttccgtctgtcgcccaggctggatgcagtggcaccatcatggctcactgcagcctcgacctctcagattcaagtgatcctcccacctcagcctcctgactagcagggactacaggcgtgcactactaacctttttttttttttttttgagacagtctcgctctgtcgcccaggctggagtgcagtggcgcaatctcggctcactgcaaactctgcctcccgggttcatgccattctcctgcctcagcacctgccaccacacccggctaatcttttatattgttagtagagacagggtttcaccgtgttagccaagatggtctcgatctcctgacctcgtgatctgcccgcctcggcctcccaacatgctgtgattacaggcataagccaccgcgcccggctacactggctaattttttaactttttatagcgacaggggtctcactatgttgctcaggctggtctcaaactcctgggctcaagtgatcctcctgccttggcctcccagtgttaggattacaggagtgggccaccatatctggcctgaaataattttggaacctctcctctcctcccttgggagggctgactgaggatgaagaacccacagctttccctggcccaatgtatgtactttcagaactgaagggcaccagtccctgcagaggactccaaagaccatccaaagaaatctgggcagggctttctggagggtggcctgttgggaagaacctggccctttccttacagccagctcttctcacacctgagctggccccaacagccagagggaatagcctgctcctgccacagggcaccaagatcgtacctgtatgtagttgggactacagcagaagttcaaactctgggtaaaaactagacacgttcccactgcatatgcagtagatggtagacaaatagttaatcatcagatcaaaaaaaaattttttttaaacatcagaaatacatgtgacaatccgatgatttttttttttctctgaatagactactaagtccagccaataaatggcttctagtggaggcttaatagctcaagacctgtgaggctacttaaatcaaaggaagaacgcttttttaaactaccatcttgggctgggcacggtggctcacgcctgtaattccagcactttgggaagccaaggtgggtggatcacctgaggtcaggagttcaagaccagcctgggcaccatagtgaaacccccatctctaccaaaactacaaaaaattagctgggtgtggtggcgggtgcctgtaatcccagctattcgggaggctaaagcagaattgcttgaatctgggaagtggaggttgcagtgagctgagatcgcgccattgcactccagcctgggcaacaagagcaaaactctgtctcaaaacaaaacaaaacaaaaacctaccatctttaggacaggggttggcaaactatgatccatgggccaaatctagcccactgactgattctgtatggcttttagcatgaagaattatttttacagatgaacatttgcaagaggcttgatgacagggaacactaatgagtcccagttaaacaacatgttatctcctaaaagaactccagtcctcacgttagtgggccagtagcattataaataaactgaattccactttgaatttcaccaattaaaaatttgggaaatctgttttctctcagaatataagtacttacacaatgtccttagattttgcctcttggcctgcaaagtctatatatttactaatttaggcccttttagaaagtttgccgacccctgctttaggatgtcaatttgaatcccaaagcatctaaaacattaaattctgtccctaatatgccaagaggaagaaaagtacagcctgttaaatattaacgcacactttttttttattatattaaaatcaggcaatggtctgacaataaaaaggctgcttatggaatactgttatgttaaacttcacttacaggatgttaaatccttagaactaaggttttccccccagaaaaagattaatggaaacatcaattgcttttcagacttgatagttgctgcttcaaaaggtggttttacacaaatactaaattaaaaaaaaaaaaaaaacctttagtacacaatgaattgcttttatttcggtatgcatccacatttcagcatttagtggtcctgaacagcaagtggaaagacgcagcaatttgccaggaggtcaagcccaccaatttcggggatctgctgtgcacaccgggttccttcttaatccctgctgaggatcttgggaagcagcagcagcaccaaaaccaaggcatgcaccggattcaaggttctttttgttccagttgtcagattccaaactagaccccaatggattgcaaggatgaccaaatgaaagccctgtttaaaacttcttcaatttttaaaagcaaaagcagttacaggaaagtaaaacaattcagagggatcatgtgtgcttacaagtatcttcatgcggtctttctccaagttcaaccaccaaggactccgagagctggcaggtctgagtaaccctggtgactattcttttcaccttatcaaaacctgagctaaaaacaatgcatcagctgatgacagcagagggtggcagggctgaggacccaatattcatttcccaggctggtggagagtgagtgagtatggttccaaaactaaacaagggaggtcagaggctctttccaaccttacctgatggcttctggccaaagcaaggaagtgtcatggaaggtgttgggtggtgacggtgcaaaaaggaacttgaggaggagggagaaaaagcagcacccctcgataaaggtgggggagagaagatatggggaaagccctgaattcctcaccgaaggccaatctcagaggggagtggaggggttacaatctatgcttcggccaagggcgggagtggaggagcgtggggacaggatgatggtttggaaggggcatcacttaagacttaaagaaaccaggggtgcaggcgaaacaccccacacacctagcagtagtcccacaggctgcgacctgaaaccttcacatctactctaacaagccccccaggctagagggctgttgttgcagggagggtgggaggcgggagggtaaggggagaaggcagagaccccaggccgtgtaatcagcagcaaggtgattgtgtgatgtgtcttttcacagttgagttagatgtgccccaccagttatgatgggaatcaatttaaatagactttcttgatcccagaagttcaactacgtggacagtggttacacttgacaggatgatttgttatagcacaacttatatatttcaaatggacaaaaaattagtatcatttacagtatcttaagataaatttcctttgaatgggagcttcctttccggtactttgaggtctacaagacgtatctagaaaatttactactgtggaaaatgaagactgattaaatcgaattggggggaaggggaagggcctgtggtttttctttttgattaattgctgtaacactgtccttcgggcggctgagggagtttcatattttctttagacatcattaggcgccgaagctcttgcaggacaactttgatgctatatgaattctgccattttgctagcactgatatggctcttgggtccacctacaacaaggcaaacaaaagcaaattactctcagactctcaaacaaaatagctatatgccggggttaagctaaggtgcaaactggagtaagatgtactttttaagctgaacctgctgctaatcctaataccttacatgcggaatacctacctgctagagtccctccctccagtcagcctgcctttcccttttgtgccctgaaccattactatctgggataaggaaacggtggtactgacacttgggtgagactcaacccagccctacttggctcttcaataatggccgctgctgggctggcggctgccgggctcaggacctgtcctcttcactgcgcccaggtcagggggacagatgtgcatgcagggcagtacggacagccaaggcaaagggtggccaggacacctgctccagtgacaagggcctgccacagagccagcacctctcaggttaaggcagcatttcccaaaataaattccccaaagcacaggttgagctctgggctcaggactttaggtggaactcagattcaggattaaacactaaacacactgtaacaaagctcatctcttttcaattttccagtcttctgagtatctcaaagacgaaggcttggcgtgacgttaacatgtgtagcatcccttcaacacttgctgatctcctctttgaacaggagagcaggcctcaaaggctcaaagcttttggcaaatgacacatggagtcaagatttattaacattgctctgtttttgtaatatttactgttgccattattgcccagttatgacaactgagacaggtttttcatttatggtagtaaaaataaaaaagcaaggccattaaaggaaaaaaatattacatgccagtggttcacaaataaggcccaggggggtaaaggtgtagccctgggaaagatcttccacgtctgtgcctcagtttcctcatctctacctcactggggtggcatgaggaaagagctcatatttcaaagcgaccagcacagaactagcccagggtaagtgctatatgagtgatcgccagatataattgggaaacaggccccatcccaaatctgtgctcctatgcacagtgatacagtttatcaacaaataaccaaagaacctaggaattgggcccagtctaaaagctcctgatgttaagtacaaagcaactgtcaactccaaggaacaagtgggacagagaaaacaacttaccactccattagaactatttactccattcatattaatttttgttacaaatcttacaaaggggggtgcttctgggtatttaggtccacattctattttaaggctgtatattcggttttcataaattgtctggaaaaaaagagtacggagatgtcacgcaattacaaacaaagcattcaaaaaggtagagcttgtgaaaccccatttatccctgactgtagaactggtacatctgcttccagcatggagtctacttgttctgtggtaggtcagcagttctatactagttcctacactagtttatatgacttccgggccttgggggaatacaaagaagatggagcatttaagctagtaccagtgaagtttttagtattaagtctaatcagagggacctgtttttatgttaatttctctactttgcagtccttctctggggaatggtaagaggcattctctattctaggaagccgagttaaatgtccactcaccaggatcatcagccaatcagttaaataacactatgtggtattaaagcacagaacaggtcactgctttagagaacctcaaaattaagacaagacgagggaggggtgcagactcagagctgcttcccccttctccatcactccggggttaggcactgggtaagggatttcaactggggtgttccatccctccctgcagtctttttttttttttttggtagtctgacctgagagattactggcattcaatgggtgaggcagcacagggaaaagcagtcttttttttttttttttttttttgagacagagttttgctcttgttgcccaggctggagtgcaatggtgcgatctcggctcaccgcaacctccgcctcccgggttcaagtgactctcctgtctcctgagtagctgggattacaggcatgtgccaccatggccgggtaattttgtatttttagtagagacagggtttctccatgttggtcaggctggtctcgaactcctgacctcagctgatctgccctcttcggcctcccaaagtgctgggattacaggcatgagccaccgtacccagccaaaaaccgtccttctttaaaaggctaactgtgcctttgttgagaaacactgaaaagtccaaccccctatgccaataacctcttcactgtaccatctaccccataagcagggagatgcgctctgttgcccggctgttccttctgcttggagcgtcctgcccccacctgaaatgccttgcaaccctgaagacccagctcaaacactacctagtccctagctttctatcccatatgaagtcacactgctatcacatgtgtctgaagaccacactgaagggtgatgtctcccagtaaagagtaaccccctcaaaggcaggggctcccctctctgtgggttcccctgtcaggcatcagtgccttctccggcatcagtaccctctccggcatccgtgccctctcctcaggaaaggagtcttgtactgcataattgctcccgtgtaaacagcggcatctagtggtctttggggagaataaatcagaggatgtgatttaaacccttgattcagaaggcattcataatatacccatggaaacttttcttgtccacagggatcccaaactacaaccaaaccaaaactgtgaatttctacctaccctcaacctgccctcttcctcctcagtgaatgacatcagcatctacccagttagctaaagcaaaaactagcaggcaacccaattcccctctcccttaccctctacctgccagtggtcagaaggtcccactgttctacctctgaaagagaccccactgttctacctctgaaagagaccccatatccatccactttcctccaccaccgtcacctcttctgaactcccccaagtctctttctctcttgctcccggcacagcagccagaccaacgtcttaaaaacaggaagctgtctctgctggcttaaccctctgatggctcctagtgacctgaagaggaagccaaagttcccagactgacccgggcagccctaactgcctcttcttttactcttctccctcccctgcccaccattcctcttcaaccttgccaagttctctccaccttggggctctcaccccagctgcttccccttggaagtgttcccgatcccctcagcccctcccaactgaggctcagttatgcatcagacaccctcactaaacacagaaaaaggagggtgggggccttgacaggggccctcaactgaattggtactcaaatgtttgttgaatgtttctcttcacacttttatattataaaataaacacctcattgcaattaaggtgtttcctcaaagaaaaaaaaaacccagtaaacagaacaagtaggaagcaaacaaaggcatgactcacatacagatttatggagaatataacagatccatcctcagaacctatcatagtctccatcaacaactatatactcagtgttgactgaatagatcctgaatggagcaaaaatcatgctccctggttttgtcacacaattcaagaatgaaattccttacattttaaggaatcaaatttctcaccactgatattcatctggtaatttcactggaagacagtaaaaaaaaaagcctcaagtcatcacagacacacacctgaagggtcatttaaaagccccaacctaaggccgggtgagctggctcacgcctgtaatcccagcacttcgggaagccgagacaggcggatcacaaggtcagtagatcgagaccatcctggctaacacggtgaaaccctgtctctactaaaaatacaaaacattagccgggtgtggttgtgggcgcctatagtcccagctacttgtgaggctgaggcaggagaatggcacgaacccgggaggtggagcttgcagtgagccgagattgcgccactgcactccagcctgggcgacagtgcgagactccatctcaaaaacaaaaaacaaaaaacaaaaaaccccaagctaaggctgggtgcggtggatgacgcctgtaatctcggcatctgggggggccgaggtgggtggataacctgaggtcaggagttcgagacccatctggccaacatgatgaaaccctgtctctactaaaaatacaaaaattagccaggcatattggcaggtgcctgtagtcccagctaaccggggggctgagacaggtgaactgcttaaacctgggaggtggaagttgcagtgagccgagactgcaccactccactccagcctgggtgacattgcgacactttgtcaaaaaaaaaaaaaaaaagccccaagctagactttaatagaaaccagggttacagggtttctggtttttttattttgttcatgagtgctccagggacctgctaaaaaggtttcagcaaaggaaatgtgcctgaaggagaattgctggaacattctgcgtctgtgagaaatactgctcttaagattcattatttgatcatgaaacaaacactttccactttgttgatatggctcatgctttgtggagccgtttggcagtgctcatcaacatgtgaaatgggcatgctcagaccagcaggccccttcctagcaatttccttcagagagacgcaaacttgtgcacaaaatgtgaagcactgtctgcaatagcaaaaataactacaatctacatgtctccttgcaagggactatatgaacatggcatattcatataacccggagacttcgtagccttctcaaaggccgagggacactccttgggcacacacacacatacgaaagactggcaaaacatggcaccaggtatagacgatacattgtaggatatgtatagcctataaaagcagacatacactttcttccaattctggatatatttgtgtgcacacaggctactttgtccattaggcactacaggcccagagcctggagattataaatttttcctgggccaaatgcatacatatgagataaccccagtctaatcattaaaaaaaaaaaaaaaaaaagacaaattccaatagagagacagtctacaaaatacctgaccagtactcctcaaaacagccaagggcatcaaaaacaagaaaaacctgagaaatgtcattgccacgaggagccagagatatgatgactaagtgtaatgtggtatcttggatgggattctggaacaaaaaacagatataagtaaaaactaagaacacctgaataaagtatggactttagctaataataatgtatcaacgttggtttattggttgtgacaaatgtaccataataacataagatgctagcaacagggaaaaggtagcacaggaagtactacctttgcaacttttctataagcctgtaagtattagaaaataaaatttgttttaaaaatgtatgagctaggctaggcacggtggcccacgcctgtaatctcagcactttgggaggccaagacaggaggactgcgtgagcccaggagttcaagaccagcctgggcaacaaagtgagaccctgtctctacaaaaagtaaaaaaaaattagccaggtgtggtggtgcgcctgtggtcttggctacttcggaggctgaggcaggaggattacttgatcccaggaggtcaaggctacagtgagctgtgattgtgtcactgaacttcagcctgggtgacagaatgagaccctatctcaaaaaaaaaaaaaaaagtatgagatatgagaaaaggaaaaaggtattaattacaaaaatatgcaaggaaaattacaaaatctaaacatacaaaaaggaaacattaggtcaaccagtcacctgctattcagttccaatcttacatagttatatacaaattacgtttaatgtacaatgtgggtacatgctatgttagaatgcagatcacagtaactgttggggagaagagtggggatatggcagttagggataaatcaggaaaaaagactccacactaggttttataacagaatttaatataagacattgcttaaacaggcgtcagtggactgaaaatgttcaaagggaatctaagctaacacagatgtaataacgaaatgaagcaggatggaaactcttaagggagggggggataagctggagtttaccagggttgagtttaccagggttggaggctaaggaagaggtctgaagagttgaactcagaactctgaggaaggggtgctgcctggctgctgctagaacctccaaggagggggcttggcgggatgtgatgaggctggttttgtgaatgtccccagaaagctggaggttgaaacacactgctgatgccaggatgaagggctgttaccagggtggtacagacagaacaaacaggcaaactggatacagcaaatcccttttcccttccccatgcctttcaggctctctcttgtgtccctgactggtggaaccttcagaggaagccagctgacaaaggaaaagtgtagtgtgcagagtcccagccccagcatccaaagcagagtggagagaagtgggcttggagtttcctagccagcagcagcaggcacctctctgcacagcgacgagacacaattatcctttgtacagagactctccctcttcccaccattcatggtatctttctgagtgagcacggggcccatctctaggcaatagtaagttttcacttctctagttaggttgtagaatatttgggtggcactcaaatattcttaaggactgaatggtcaaattaaccacatgatcctaatagaaaataaaaagtaggaggcatttgacccttcacatttgcttgctgttcctttaggtatcaccccagtatgagccccttacctcggcagcaagagctggttctgggcttcagtgtcttttgcactcccccaaccaggcttgcccctgccccgcaggtgccagcagcagcagagggggcaccttttccccaagtgccaggttctgacagcccaagcttcctctgctggcctcccaaacccagagggtggttactgtttctgcagcagtatctctgtgttctcatattgtgccttctttgattttttagtccaacatctatttgatcaacttcctatattaaattatctctgttgcctagtattgggtatcaatccaaaggaaattaaatcagtatctcaaagagatcatctgcacttccacactcattgcagttattcacaatagccaatatatggaaacaacttaaatgtcctagagaaaatatggcatatatcacacaatgaaatattattcagccataaataagaaatcctgccagtcggagaattgcttgaacctgggaggcgggggctgcagtgagccgagatggcgccactgcactccagcctgggcaacagtgcgagactctgtctcaaaaaaaaaaaaaaaaagaaatcttgctagtcatgacaacatagatgagcctgaaggacattatgctaagtgaaatcagccagacacagaaagacaaaaagtgtatgatctcaattatacatggaatctaaaagtagaactcacagaagcagagaacagaacagtggttgacagggaccagggtgtaaggggagatactggtcaaagggcacaaactttcagttatgagtaagttctgggaatctaatgtaaagcatggtgactacagttaataatactggattgtttacttgaaatttggtaaaagagtagatcttaagtgtccttaccacagacacacaaggtagctacacgtggtgatggatgcgttgattaatttggttgtggtaatcattacacaatgtatatcaaatcatcacactgtataccttggatatatacagcttttatttatcaattacatctcaataaagctgggaaaaaaattagctggtatgatttctcttttcctgactgacacagagttaaagcgggactaagttaacctcttattctatatactctgtattgttggaaaaaaaattttttttgagacaagagtctcactctgtcacccaggttggagtccagtggtatgatcttggcccactgaaacctctgcctcctgggttcaagcgattctccctcctcagcctcttgagtagctgggactacaggcgtgcatcactacgcccagctaatttttgtatttttagtagagatggggtttcaacatgttggccaggctggtctcgactcctgacctcaagtgattcacctgcctcggcctcccaaagcgctgggattacaggcgtgaatcaccacacctgggcttttgtcattaaaaatttttacaagaatatattcatattcattaatcagtcatataacttaaggcttttttttttttttttttgagatggagtctcgctcttgttgcaagcagtggcgcgatctcggcttactgcaacctctacctcccaggttcaagtgattctcctgcctcagcctcctgagtcaggcatctgccaccgcgcccagctaatttttatacttttttagtagcgaccgggtttcgccatattggccaggctggtcttgaactcctgacctcaggtgatctgcccgccttggcctcccaaagtgctggaattacaggcgtgagttaccacgccccgcctcaaagcttttaaaaaagagatcagtcaatatgcactgatatagaaagatgtccaccatctattaggtgaaaaaaaattaagttgtaaaacattatgcataggaagatcccatttttcttaaaaagatatatatttacgtttgcatacccacagcaaaagtgggtagaaccacaccacacaccaacttaagtttcattcgatggtgagcataatgaatcagagaaaggatcacttttcttttacttcctacacccctgtaattatgttcagttcctctgaagcatgggtaccagtactccagggtataaacacacatccaggctctaatccacacataaaacacttggccgggtgtggtgggctcatgcctgtaatcccagcactttgagagaccaaggtgggcggatcacctgaggtcaggagtctgagaccagcctggccaacacggcaaaaacctgtctctactaaaaatataaaaattagccgggtgtggtggtatgtgcctataaccccagcgactagggaggctgaggcaggagaatcgcttgaacccgggagacagagactgccgtgagctgaaatcacgccactgcactccaccctgggcaacagaataagactccatctcaaaaaaacagaaaaaacactattttggagaaccccagaggctcaacagtgctcctcgatgagggccatttttgcccctctgctgggaaggggaagggaggatcaagcgttgcctagacacatttatggttgctgcaatggagacgggggtactgctggcttctagtgagtagaggccagggatgctgctaaacagcctacaacgcacatacctagcactctcatgacaaagaaaagaaccagccctacatgccacgtctgagaaactctgctctatataacttgactattgttagtacttctgtggtcaaagtagaaatattccatgtctaacgctgtggacagctagacatttgccagaattgtgcaaggagcagttggctcagaagctttgtttttaggtttggaggatttgcttttctttaaataaacaaacaaacaaaaaaggtgggggcactattcaaacagcacacacatatgactaaaacattcaaagagtacagaagggtatatggtaaaaagtaagtttcctttccactccagccctagccagccagctcccttctgaagaagacaaccactgtcagcagcttctttcccattcctccagaggtattctaagcacacagaagcagtgtatgcatgagctcttcctctgcacccaaggccccccactccaactggcagcatactctgtctcctgttttataatttactttttcacaatatcatggagatcattccatttcagcacacataaatctgtctcattgttcaacagctaaacaggacataatatggtatactcaaagacaatgatgttgtttccaatattttgctactactgacaatgctgcatgaaataattttgtacactgcctttgggcaatacattcaagagaaattggaaagtaaattcctagaagaattcctggatcacatggtatagacctttgaaattttgatggaaaatgttcttttgagtaaaacaataacaaaaacctaatagggagatgagttactcaagtgctctatttagatgctttaataattatgtggatattcgagttacacagcaaatagctcatgtgctaatcatgaaagattggtcacaggaagcatctacacacagatagttccttttatgacttagtttctgaccttggggaaccaggataataaaaactacaagggtgaaaagacaataacaagtgttggtgagaatgtggagaaatgggaactttcgggcattgctagtaggaatgtaaaatggtgcagccactttgggaaacagtttggcatttcctccaaatgttaaacacagttaccatatgatccagcaattccactcctaggtatacacccaggggaattcaaaaatgtatctccggcagggcgcgatggctcacacctgtaattccagcactttgggaggccgaggtgggtagatcatgaggtcaggagttcaagaccagcctggctaagatggtgaaaccccgtctctactaaaaatacaaaattagctgggcgtggtggcgggtacctgtaatcccagctactcgggaggctgaggcagagaattgcttgaatccgggaggtggaggttgcagtgagccgagattgcgccactgcactccagcctgggagacagagcgagactccaactcaaaaaaaaaaaaaaaaaaaaaaaaataataataataataataataaaatatatatatataaaatatattatgtatgttatatatataatatatataggcttggaggatttgcttttatttaaataaaaatatattatatattataattatatatcttatatataattatatgtaatatatattacatatcatatatgttatataaatatacagtatatataatatataacatatgcattatataatatataatgcattatataatatataatgcattatataatatataatgcattatataatatataattatatataatatatgtccatcttcaaaggaggaaaaattaggtagctaaaaacaactatgtccatctattccagcaggtgtagataaaaaaataaaaagaaaatatatgtccacatacaaacctgtatataaatgttcctagaagcattatttataatagccaaaaggtagaaacaacccaaatgttcatcaacaaatggaaaaacaaaatatggcgtatctgtacaatggaatattattcagccataagaagaataaaagtattgatagatgctacaatatgcttgaaccttgaaaaaattatgctgagtaaaggaagccagtcacaaaaggccacatactgtagaattccatttataatagatgttcagaaaaagcaaattcattgagctagaaagtagactgatgattgtcaaagatgggaaatgggggatgtgggagggagaatggggggtgcctaccgatgggtatgggttcctttttgaggtgatgaaaacgttctgaaattagtgacggatgcacaactctgaatgtaagaccaccgaactgtatatttaaaagggtgaattctatcccaataaagctgttaccaaaaacaaatacatggaggactcctggcataccgtagctacgcattacaacttccaaagcctcttttggaaagagataaactgaaattcagggtagcccaagctgttttaggcagacagaatattttcagcagaatttactgatgcattgttttgtgtgtttttttgaaagtgtacaattcagtggtatttagtgtatcgcaatgttgtacattggttcaattctcagtattttagaacctgtaaatcagtaagttgattaacaaatctactgagtaccccattctgagtcatttctaggtattctgggaagtaaggagggaagcacagttctcatcctcaagaaaccgaaatcattcttaggaagagaagacatgcagtgaagaagatgtcagcatatgatggaccttcagagacagcaaagaaaattatctccatggagaaacaggatttctagattgggttttccccggtatttagcagacgcagaaaattctggttttcacaggaaaaaaaggataaagaaatgagtaaaaacagatcaaatgtatatatttttaaaactccacaaaactatagggtcacaaaatgacttaagaagcaacattaaatggcaaagccaatcattcaccatgagtgttgatgaccatctgaaatgagcattagtgtcctaacacttaacgaacatgtcacttgtccctgttccagcccgggccacgccctacatgtctttctgctctcacagtgctagtgcagagtcctgcacacaatcaaaagaatgaatgttgtcatcatccttaaacacaagcagacacaggacaggtcttgctacattcaggcagaggcccttactgcttgtctgaagtgtgtgtcacagtatggaaatcaatttcttgactcctacatcaagttactacttgattagtatcttctataatggtaacagatgaaaactcaaaatgtaaacaaaagggagacaccacagcacagtggttaagagcacaggctctggagtcagatctggtttgggggttaccagctatgtgactttgggcaagagatctgactcctctgagtctgtctcctcatctgtgaaatggaatgcaattgcacctaacaatggggtcttgtgagagttaagagacatttcttgagggtttactatgtgtcctcaaaaaacggttggctggcattatgaagactgggaactctcacaaatcaggaaggtctgaaagaggccacttttccccatcctcattgtcttcgtcttctttgcaaaggcctctgggtctagtagtgcctggaatagaccaggagctgacaggcttgccagggacctttgctgaatggcccaaggaactaggatacaggtgcacggcagacctgggagacagtgaagaaaaaccacaactgggaaggctttccagagttaatttggagactggcttcaggaatgctggctatacctagggcctagttatttggttagcccagagattgttctgaacgacatctgatggtgcaatgacttcacacctcactgtctacattgtcatataaattcacactatgagtctaaacaggtttttgcttaccatttagaggggttaaacagcatcagaggaggttcaaatatataaactgaaactggtcaaaaaagaatagccacatttcagaaaatataccattggtgagctttttttccgtgataaggctaatattttttaaaaggaggcacagtgaatttaagacattgacatttatagccgtagctcgacgcttactcttggaggcccaattatcatccctgtccatcttgtaagtgtcatgtcttcgtcatcttctagaccccagctaactgtgccatctcctactcctttctggccttcttcgagttcttccaacagtcggaaattgcgagggacttttactcctaaaataaatggaaagaaattcaagataccagcaactccaggggaacttgtaagcctagagctagctgctcattatctctccctgggaatcaagatgctaacatgcaaaaaaatcacggaaagttatcacacctcaaacttgctacttataaagctatcagtatcaaccagcacaaccagagggaaggggcacatggttctctgacaggtgaagtgactagggctagataaccaaacttagaaagataccccacccctaccccttggacaaacctcctaaggggcttacatgtctaaatgtctatgaattggggtcaactagtatgagatgaaaaccatcaatatcaggtgctaacaaaagtaccttggaagacaagaggctaagactacgcttatttgttggcatgactctcaaacaacctttaggaggaatagtcaccatggatatgggaaataaaaatggtatcctcttaatcaactaagagtcaactgaaggcaccaaggataaaatattctattgtttttcaattatttaagtgatagtttctcttttaacttacaaaaaagctaaaagggaatagctggttctcaattgttttccaaaaatcccaaagcctggcaagtagctcttgaaagcaacgcatgaaaacacctcacaggttcaagccacagtaccgggttcaggctgaggcttgagccatttctaggtgtcttccagaacagaacctaggtactggggccagacaagggagggggctatgggaggagagagagatggactttccttctgtgcttggggaacaaatcatctctcctagggttgcactcccaaccaatcctgactgtctctccttcctccattttccctggcatatgcactattttctctggaaaaaactcaggatccagtcaagtttcaagttctctgccttgaatgctgagctctcaattggccagactctcagagacaaacaggactaaccatgtgactgtgaagagaggctcactggagggaccccagattgtgggaggtgttgccagtatatgtatttcccaaagtgtaggacacacgccattaattcaattggaataaatatttgagtacttagtatacatcggggacttttctaagcactgaagaacaagcagtgaataaaacaaaaatgcctgcagcttacattctagtagaagacatataatggacaaaaatgaatatgtaaattatacagtatgacagatcctggtgttccggaggagggagtaatacgggaggggctatacttttaaatggagggataaaggaaaagtgttattgcaatcaggtgtcataactaaagacctaaagaaggtgagagggcatgatttatggatagctgaggagaaagtctttgagacagagcaaacaagtgcaaaggccctaaaatagaggctgcttagggtgtcaaaggacagcaaggaggccaatttagctcaaaccaagtgaggaagatgagagagcaagaggagattaaggatgccaactgttactgagtgacatgatctgtcttgtttttaataggatccctcagactgctgtgtgaggatgagagtgaagggagcaagggcagaagcagctaggaggctactgcaataatcctagcaaaagataatacccgtttggaccagggtgatagcaggaaagtagtgaggagtggcgtaattctaggcatttcagaggtctgagctgtggagatttgctatcaggttgcctgtgaggtgtgagagacaagagtcaactacagctcccaggtttttggtccaagcaactgaaggacagagttggtagtggtatgttagaggactttcggtggtatgtgattgaacacttcgttttacagtcacgtatttatgtttaagaataacttatttagggtaagtaatatactaacttcccatttataataatggtaaaagtttcctttaaaataaatgtaagcaaaagagtcagttgattacaagaaaaatattaaatagtactacatatggtatttgaaaggaaacagcaaaacctgcaagcatacttgaactgcttgtttggaaaacactggcattttcatctgcacagcagccaactggattattcagctatactggattaagtctcctgtagcaaacataaaactgaaagatagtggtgacattataggcaaaaagccagacaacacaactattgttcagaaagggttcaatctaaatctttaataatcctaattaggctagcgggggaaaagtcactacattactactggttaatttacaagcctgcactaataaaaatgaacatcaaaagaatcatattgataggaaggctgatgactgaggtacttgttcacagatcgtgctatgggctgggctgaactgtgttcccctcaaatttatatacttaagtcctaactcccagtacctcagaatgtgacaaaacctgctgacaccttgatcttgggcttctggtctctagagctgtgagaaatttgttgtttaagccccacccagtctatggtattttgttatgacagcactagcaaactcatatagatgataagtgacatcttaaggagctttatagagttggtaaggatacagaacaagatgttaacagctgttatctctgggtaaaagaattatggatgattccccctactttctctatttcctgatttttttacaacaatcccatgttatttgcataacaaaaaaccaattaggaaccatttcaactgcacccccacgcaaggacctacccagggcctgtgcgactgtcattcctgctgtccagaaggctccttcccctaggaatccataagccaagctccctcagcttctttagggctttggttgtccagcacttcatctcaataaggatcaagggttcttctctgagtaggaatctcacttaacggcattccttaagtgactaacttttaatggacaatgattttaatgttactaaaacttggtcagctgggtatggcagctcacacctgtaatcccagcactttgagaggccaagacaatcgtctgaggccaggagttcgagatcagcctgggcaacatggagaaatctcatgtctacaaaaaaatacaagaattagctgggcatggtggtgcccacctgtagtcctagttactcaggaggctgagaggggagggtcacttgagccaggaaggcggaggttgcagtgaggcgagactgcaccactgcactccagcctgggcgacagagtgagaccctgtctcaaaaaccaaaaataaacaaaaaataataaataaattagctgggtgtggtggtgcacacctgtagtcccagctgcttaggaggctgagacaggaggactgcttgagcctggaaggtcaagtctgtagtgagctatgatcacgccactgcattccagcctgggcaacagagcaagaacctgtctctatttaaaaaaaaaaaaaaaaaaaagacggggcgcggtggctcacacctgtaattccagcactttgggaggccgaggtgggtggatcatgaggtcaagagttcaagatcagcctggctagtatgatgaaactccgtctctactaaaaatacaaaattagccgggcgtggtggtgtgcacctgtagtcccagctactcgggaggctgaggcagaaaaattgcttgaaccctggaggcagaggttgcagtgagctgaggttgcaccactgcactccagcctgagtgacagagcaagactccatctccaaaaaaaaaaaagtgttaagactgtcaaataaatggcaaagtataacagcttctacagttaagcccttcattactgaatggaagctgtattacacaagtgacctctattttgagttgctctttttggcaagacaaaaaaatgtgttagtttcttatgtcaggtatttaaatgtcagctggactatttatagtaggactattcctcttgcaaacttaagcaaagaacttctctatggctgaaaggttaccttttcacctaacaatcagatctgattaggaaatcctaacattcaaatatcacaagcttgttgctattagtttcaaaacagtgaattcaagttataattttctgatatttaatttttacttgtgaagtagggcaaaatatattagtaattaatcctatacttccaacatacatttctactggattagatattcgattacttaaaaacaagtgtgcaaagcccacacatacaactgaaccaaagaaataagtcaggtcaatttattttaggctaggatttggaacaggaattgagacccacagagggaaaggtcagctttcttttgttcctgcattataggacaatttgattctgactcaagttgtaaagccagcaccagaaacagtttaataaatgaaaaactttggactggccaatatctatctgtattgcaactaggagttgtgatatacatataaatatctataactgctatctactgaacaattacaataaacatttatttcatttgaacagcagttctcaaaccttttgctctcaagaatgctttatactctcaaaatcattgaagacctcaaagaactttttttttttttttttttgagacaaagtctcgctcttgttccctaggctggagtgcaatgacgcaatctcagctcactgcaacctctgcctcctaggttcaagcaattctcatgatgtttaatgtgtatagaactggacttcacatttataagcaaaaaaaaaaaaaaaaaaaaaaaaattttacacatttcaggaccacagtgaaaaaaagtttgcttggctttttacctgcttgtcaaaatttccctatacataaattatcagtaacatataggcacacacaccttctctcagtgtgatagttatccaatacctatccagcactttgctagacaatctaggggctatgaacaaaataaaaactggggtctccctaacacagtctaaggtgtcagtgtggaaacaagatatacacaaagggcaatgaaataaaaccatatcaaagcacgagaaacagaacctaccagaggacactgttacttagcctttgagggctcacagccttctctgaaatctgacaaaagatgaagaggttggagccatgttactactggactttaccttaagggtaatcggggggagctgcaaaaggctcagagtagggcaagagataaggcatatccaagtctcctaggtaatgatcagctttggggtgtgctactgctaacgtctcaggatatagagccagaagcatttgcctagagcaaacactgtgaccgaacatgtggcatcaaacttcttataggcctgcgtgatgggaagtagaagagatgtagaagatagggtaattaattcaacagctcatattcatttgcatgactgtggtggtagttcaaaaaacaacaacaacaaaaaacaaaaaaactggcctgtacccagtacttcagataaatacctgttgaaaattttttaaatcgagtaaaaaaggacaaaaggtctgcaaacctcattttctaaaaaacaaacacaaaagcaaccttgtatgcatccttgcatgttcattgtactctcaccaatgatcttggggtgtcatgacccagaatcactaacgtaaggatacctggtctaccactctgtttttaaaagacaggtcagagtaatggatatattacctcccacatgcgctaccatgcctgactaattttgtatttttagtagagacggggtttttccatgttggtcaggctggtctcgaactcccgacctcaggtgatccgctggcctcagcttcccaaagtgctgggattacaggtgtgagccaccgtgctcggccgacgatcctcttaaaggtaaactaggtgccctcgctctcctaccagaagcctactcttggcctcccgttgcacccgcaatccacccaaacttgtcacctggccgagagagccccacctgcttcgccaacatcattttgtgccactctgccttgctcccccatcctcctccagctacaccagtccttctctaagtttctgaagaggcatccttacatcccgcctttgtatttgtgagtccctcaccctggaattctctgtcccagagctgtgaatggctgactggttcccttgtcctcaaccaagggtctaactgtccattcccttatcttgccttatttttcttcatagtactcattgccactcgacattgtaaatatattcattttcactttattggttgtttcttgtctgtctcccatctgaacataagctccatgagagtaaaacttcatctgttttgttcactgctgaatctccaatgtgtcagggtgttttgccctctagagtaagcacccaaatacttattgaaagaattaatgaatgactaggtattagctaggaacagtatttcagaatgaacaacgctcaatgtcacaaaattctaatctggtttatttttgaaaatacaagagagaaacattcacagcaccattatctgggagtctaacattataaggattattaaaggggcttagtatgaattttaaagcctaagaacagttatatattaagaggcagagtcccactctgttacccaggctggagtgcagtggtgtgattttggctcgctgcaacctcggtctcctgtgttgaagtgtttcttgcacctcagcctcccaagtagctgggattacaggcgcctgccaccacgcccagctaatttttgcattttcagtagagacggggttttaccatgttggctaggctggtctcaaactcctggcctcaagtgatctgcccgccttggcctcccaaggtgctgggattacaggcatcagccattgcacccggcctgactataataattttaaaagctataaagcttaattagaagccaggcagtcaggagaggccctctcagagaccccggtcccggtcccaaacacctttacttccacacaggcatgtgtggtatgttttctttacatttgattttcttccttttttattgtctgactcactctctaagtttctcaagtcagagctgtgactcattcaatcccgcctccccagaatctggtatgctgtctggcatataatgatactcaatatcaataaatgtttgctggttgaagaaatggcagtatcaggccaggcgtggtggctcatgcctgtaatcccagcactttggaaggctgagacaggcggatcacgaggtcaggagatcgagatcatcctggccaacgtggtgaaaccctgtctctactaaaaatacaaaaattagctgggcgtggtggtgcgcgcctgtaatcccagctactcgagaggctgaggcaggagaattgcttgaacctgggaggcggaggttacagtgagccgagatcgcgccacggcactccagcctggcaatagggccagactccgtctcaaaaaaaaaaaaaaaaaaggcagtatttcctattgtaaactctaatctactgggtccaaaatattggacactgttgccatataattaacatacctggctgggcgcggtggctcacgcctataatcccagcactttgggaggccgaggcgggcggatcacgaggtcaggagatcgagaccatcctggctaacacggtgaaaccccgtctctactaaaaatacaaaaaattagccgggcaaggtggcggctgcctgtagtcccagctactcgggaggctgaggcaagagaatggcgtgaaccccagggggcggagcctgcagtgagccgagattgcgccactgcactccagccagggcgacagtgagactctggcacaaaaaaaaaaaaaaaaaaaaaattaacatacctaaggttttttattttgagataagtaaaatttggtaaccatttctaatttatttttagagatggagtctcactctgtcacccaggctggagtgcaatggcgcaatctcggctcacttcaaccttcaccttctgggttcaagcgattctcccgcctcagcctcccgagtggctgggattacaggcacgcgccacgacacccagttaattctcatatgtttagtagagacggggtttcaccatgttggccaggctggtctcagactcctgacctcaagtgatccacctgcctcagcctcccaaagtgctgggattacaggcatgagccaccacacccagcctagttttatttttaataaatgagaattttaggaaaacttaccattttttttaaaataagggaaaactggtttctcacccaaatcacataagtcaaagaattcttcactataaaatgaactttgtttcataaagtatgtatgaaagcaagttactaatatttcaaaccatttaaaaactgcatacaaagttacatcaatattttctacaaaacaaaagagcatttaattccaaatggcctaatcacaccctagttatagaattcagggtctactccagggacataagtccaaatatggttggaattcagagatcctgcagacttcaggatgtatcagtgacaagcgaaaagctcatcctatcctaaatagagtttaaattcaaaatcacggtacattaaacaaaacattttagtgaatatattaaaaaattaaacgtacatatgccaaagaacagaagcacaacagatgagaaaacccaagaatactctaacatatgttttggtcctctagcactttaatcaattgaatcaacataaaattttaggattcccaatatttctgtgtgaatctgacaccaaaaaggcagctggagaaacagcatcaagtgacaatatggaagacataaaaatggactcttacaggccaggcgcagtggctcacacctgtaatctcagtactttgagaggccgaggtgggagtttgagaccagcctggccaacatggtgaaaccccatctctattaaaaatacaaaaattagccagttgtggtggcacatgcctgcaatcccagctaattgggaggctgaggcatgacaatcacttgaacccgggaggtggaggtttcagtgagctgcgatcatgccactgcagcccagcctgggcaacagagactcgtcaaaaaaaacaaaaaacaaaaaaacaaaaaaacaaaaaacaaacaaacaaaaggactcttataatcttgcaaaaccaagagaactacaggctctataatagctaggaagtacactaggaaaatctatagctaatgataagtataatcaaatagactatgactattaaaaagtgaattatgaaaatgctaaaaaaaaaaacttcatcaaggtgctaaaatatcacagtaatccaagactttttgaagaaaatatttgttcctattatttcagaattattctttccagaaggctttttcctggacctgtgtcagtatcaaaagtcagccggttattctcttagctaaatataaactgaaaagacagcagttgcaggatattacaaagaaaatatggcaaccaggttgaaaaagcatgaatatttgatagagctttacaccatgccacagtaaaacatttaatgcagtaatctgaaacacagcaacatattaatatatttgtggtacaaaaaggattctgaagtcgtttaaaacatcttttgggaaaatcatggccaccaagcagcagctaccacagcatgtcaatcttggaaaaccctggcctaggtcttgaattaaaatggtagagctggctgggcgtggtggctcacacctgtaatcccaacactttgggaggcagagatgggtggatcacctgaggtcgggagttcgagaacagcctgaccaagatggagaaaccccgtctccactaaaaatacaaaattagctgggcgtggtggcgcatgcctgtaatcgagctactcagggggctgaggcaggagaatcacttgaacctgaacctgggaggcagaggttgcggtgagccaagatagcaccattgcactccagcctgggcaacaagagtgaaactctgtttcaaaaccaaaaacaacaacaacaacaacaacaacaacaacaaaaaaaaaaaaacaaaaaaaaggtagaacctcagaggtttctcctgaaaagaaagctgctagttaaaaatggtttggttgcccattcagggaagacagtgaactgagctaggaatctgatgctgctcccacttcagaaaatgaggaggtatggaaggtgatgcactgggattcaacgtccctgaaaactggacatagagccataagcaagtaacttttatttctgagcaaccgcccaagtgtagtctggctgtctagttagcctgcccaggagatctgttcttctccttctctagagcaatggttctccaagttagtccccagacctcatcgcaaactcgctagaaatgtacattctcaggtcttcagcccagaattcctgaatctgaaactccaaggttgggcctaagaatctgacaagccctccaggactctgaggtatactagtttgagatccattgctctaggggaattctagggaaagaattagtagcaagctgtcattctttacagtccagccacgtgacaacagctagtgacagaatgcaagaccctgtgttctgctgctagggtcagtgaccaagaccaagcatcagattttctttgacaaagggggaaacaagatgtgggaaatgagtcaggacaactggagaaggggaggatggttaattctacgatcaagtacctctataaataccaccaaataaggataagagtttcagttttttgaaaggctgaatagccacttttgcttctgccctatcggatacattgtttctccacaaattgtcaaatgtatccatttggctacatcaaagagattctgaattaactcactgcaacattcacaaatatttactgagtacctactattttgtccagaactgtgctggtgctagggacacaacagaagttgagatagaatcttgccctagtgaaaaggcatagaaaatatgcaacgaaacaacacttcaggtaaggttaagtgctttagagaaacagaacaaaacaagaagctgtgacaatgactaaaaaactattgaatggagtgctcagggacggcctttctgggtagctgcgacctgaagaacagcagtcaggcccatgaagatctggggacagagcaagatcagaggtgtgtgacaccacatgaagtcaaggcggcagggccttgtgggccatggaaaagggatgggttattctgtaataagagcagtgggaagggcttgctgaaggggagtggcagtttctattttacgtctgtgaaagatcattctgtctcctgtatagaaaatggaaagggcaagactgaaagcaagaggctttttccatcttccaggcaagagaaagacggttctggttagattaggatgacaagagtggagacagaaaggaggatttggcatttagtttggggttacacctactggacttgtgacagggtggatgtgaagatgaggaaagactactacttgagaggtcactgccatctacccatgaataagctaatcagccaaggcagaaataacagacatgccaatggctgaagatgcttgcgaggcctacctcagagaataagaaatgggggctggaagaacgatcatccggccaagagcacgtgtcctgaagcaacaccatcccagagcacccaggctctgcacctcaggctagtcactcctctcctggcctgtttcctcaccttcacaatcgatacctgcctcaatgggctgttgtgacaagtgagataatgtagttaatacagtgtctagcacttagtaaacccaagagtgcaacttaaaaagaagtctgatggcttgcatgtaaataaggatgaggtactactttgtacctgccatgatggggctccaagcccaagaggtgtgagtcattcagtataaaatataagcaagagcttcctgaaaaaaggacctcactctccttggacagcacataacccagaagaggacaaacagtggccagagatgctataaaaagggttcctgaaacgggtagcagtagacacttcttactaaagccctttctctctccaagattaaacactccaagacttaggaagaacatatccctaaatccatgccttttccatttcctgcaggctggtgagggaacaggagttaaaaatgcctgggctctagtccgagcatcaccagtctcccttggcttttggctcctccctcagtaatgtgggtggatactgcccctggctggtgaccaggctgtggagagttagatgagacaacatcacaggtaagtcgaagtctatgggacactctaaagcactatccacaatacaacagtaatagtattcaaacatttactttgccaaatgtgctgctctgaacttcactgtgccccttcaaaattaagcagaggattcctgacttcatattttgtattctacttttaccaaattactgcagagctacaatttgtggggaggtgggagggatagagatatgaagagaaaagagaatgtggtgggggaaatagagtggttttcagttaacatgaagggggaaaatcatgatcatcaaaattaaccttggtaatcccttaagaaaataatagcttgcagcccggcacggtgacttacgcctgtaatcccaggactttgggaggctgagacgggcggatcatgaggtcaggagtttgagaccagactgaccaacatggtgaaaccctgtctctactaaaaatacaaaaattagccaggcgtggtggcgcgtgcctgtgatcccagctactcaggaggctgaggcaggagaatcgcttgaacctgggaagcagaggttacagtgagccaagatcacgccactgcactccagccaggtgacagggcgaaactccgtctcaaaaaaaaaaaaaaaaaaaaagcttgcactagcccaacaaagccagtttcccctccatcactggagcaggctgctatttctttggctgagcacaatatgaagctgttctttgaatgtagggcccatgttgtacaaaaggcacttaattacaattggcataagatgctcacacagtgagacatacaggaactgagaagaactaagggactgtgagttttcatccatttccagctctctctggggaagactcttgaatggaagggaagactaatctctgctgcccacatggttaagtttttataagctgaatgtgcatatgaggccactccgatgtatgcaaatttaaaatcatgccccaccagggcttacccctctggcactcattttctgattaaatgtcagggaagctcgtgggctgctgagtgagaggaagggcctggcaaccaagggccactatttgatgtgctgcaatcctggccaaggcaggaggaagtcacccgtcataacatggggattctgaggatctgtggtgggcttttcacagttccaccctctaagacatatgtagatatcacacattgcagaaccaaaggaagtgggaaggtggtgtagccaaatgctgaaagcagtgaccataaaaaactaagttcagcccttacaggaactcaaaggcttcacagctgtttcctggcaaccggaggcacagattaatcaagagcctcactctaaacctgactaaggaaggcctctgggccctgaccacacctggaagacttctcagggttagaaagcagagaggcctgtacactcattttagtttaccccaagtaaggtctgctttactcttagcaccctgcactcttttcactgcctagggacgaaggtcagatcttatcatactcctctttttaagactcttattcattcattcaacaaatatttactgaatgcctacttcataccagacacttgtttgatggcttcccctcataccatctcaaatccaaagccatgtctctccaactcatctccttaacaagccttgcttgcacatgaaggccttttatcctgttatttcaacatgccaagcagagtcccaccacagggcctttgcactaacagcccactctctctcctgcctgtgacactgtagggttagctctttccattatttgactcagctgaaatgtcactttcctgaccacctctccagacactatcacatcacacaatttcctccatagcacttactgctatctgaaattgtcttatttactccttaacagccttctctccctgacttgaatggaagctcccgaaggatacagactatgtccattttgtttgctatccacgatgggacataataggccctcagtaaatatctgttgaataaacagacaaaagaattttgggaagtccattttagggcacctcaaagcctgtcctatgttatctaaaccatgccaagtgctcttgtattccactagacagcagctgacattttatctgatcaccatagccatttatgaagcactcactttttaactgtcagggtctggagaagttagaaccgggcagctgttaacccagattgtaggtagccaaccgagtgactgcaagcagggctgagctgcaacagcaccttattgctggctaccaccagcacactgggccccttcgtttattacgacccggtaggagtgttattctggtgagaagttttacccagcagtctggcctgactcagaatctctcttctgggagtgcctggggcagcgtcatggtaaatgaattgactcagcactgttccagctgaaaccaaaatcgagtaaaaggattcatggtctccgctattctgcaagaagaccccactgttttaaactcaaaaggcagcagcttgtggtgggtcacttcagtcagatcccccacattcaatttcttttattcccaccccaaccatcaggcaagtatggctccttgagaccgcagagtagcaacatttataaagaattcccctcaccctatttcccatggatcaccaattccttcccaacactgccgctgctgtggccttaaatatgccaatgattgctgtactcaggctggtgtccctgcagccccacagtggggaacactgtggccctgtttgcttcctccatcagagaggtaacccattttcaccccatctgagagaacctccttggccaacttcactgccaggcacctgagggtgcagcctcacccaagagttcccatttcatctattcacctccctactcccatcagccagtggggaacttctgagctgaacccacatatctgtcccaattattaaaggagtcgatgagagtgagcgtctccacagaagagacacttctaggatatgcttccctcactcaattcaaaaagaggagacttttctcctttacaggaaacatctccggaacccgaccttttccactccctcatttcaggggcttccctcagttgaatccccactcccaaagagacatcctcggggctcccaattcatctgttctccctcatccaatatcagaggcttccaccaactgccccactcggaccttgtcccctgaaacctaacttgaagcaatccatctgtatcctcgaacaggagactggtaatgatggggtcatttcactatcaccgctattaggtccctctggcatctgaatccttttccctcctctcacttatcatgcggagacccccttcattctccccaaaagcagctgctccaaggctcctcctttctagtcaacatagctatttcctcagctaaccccatctctaaaactaacgccggagccgttccctcaaccgataggggatcctctcaagtcaccccctcaggatcccgtttcttccatccagcctgaagggcttctctgatgtcccctccagacatcccaaggcccctctcagccgcacccctggcacccagtatgggacttccatccgctgtggggcgcctcctctaggggacctctagatcgccccttaagagtcgccagccccggtatcctcaggagtgcctcggagctcgctcctcgcccactccggctcccccagacagcacagagggccctcacgcctcccgggggagcctcagggcctcgccgcgccgcccacaggcccctcagccccccgcccgtgcttccggccaccgcctgctcctcctcccccggtcaggccgcgccggtggctgccgcggagcccagcagacagaggcggcgcggggaccctggctccgctgcaggaggctttgagggtccccggcccccggcccaagcccatgccccctcggccggccgggcccggcgcccccgctcacccgagcccgtggtggctgccatcttgcgtcgctcttgcttgaaggccggccccttcttcaccccccccttacccgtcccccggccctgatgcgcaggcgcgcgcgcacgcacatacgccgccgctgacgcccgccccggagacctgcacgacccgtggcctggaaggctcttttccttcccttttagagaaaggaaatatctgcgtgctcgagggcccagcaacctgcaagtccccacacatcgggtgcgagggaggttgtgatgtgcttagtgagaagggcaggggtgactaggcttgggaaggcgcgattgtgaaagaaaaagaaaatatagcttcaaacaaaagcgccgaattcgcttggggctttttcctgtctagttcctatctagatcctcaccacatctccgcaaggtcagaattaatgtgaaaaatgcagccgagagagatcaagcgatttatctaaactcagctgttaagtggcagagacaggcagaattttaacctccaggttcaaattttttgaatcatcaccctccaggtcagatgatctggctcctaggattgatgctccccggccagagaaggcttggagtgggtgcagctaaatgatttaggggcattaaggtggcagggaaagcatttgctaaccatctacccaattcattcattcattcattcattcattcgttcattcattcattcaaccaaacaaacaaacattaagcacctactatgtaccagacactgtgctaggcgctggggatggatagacatctctgaagaagcaaatccctgctttcagggacttacattctagtcgtagacagcaagtaaataaacaggaaactataattctgatagggtagagataaaccaagacaagagcagcagaggatggtcaggaagggcctcctaaggtggtcatatttcagcagagaccgtaacaatgaggaggtagagggaacagcttgtgcaaaggcccttgggaaatatttttgcaaataaataaacccaagaaggtactcctcctttattataaattgtctgagaagcccttatatggatgtagacactgaggctgagagaggtgaagggactggcttaaggtcacagagcaaaatactggcagaaggaccaggactctaaacatagagggacaaggaagctggaagccctcacccagcacatccaattcatcacctttgtctgatagcagtgcctactctgcatctctccactccgttcacttctccactcagggcaagctgcctttatctcccacttggaagaccccagcagcttccattctctcccctatggcccattctccatatagaccaacatctgctcaaaacaccctccagctaaagccttcagtggctccccattccctctggataaaatacaaactttacaagttgagcgaccatagaattatcacctaatgaggacacacatcagattaaaaggggacttattataatctcaccaggacaagtggaaaccagggctctccagggcaaagcaggatgcctggacaccctgtgcaccaggctctgcacccagggcagggacgaggatggggtggtcagatttaacggggctttcactcaggtcctgactccgcacttgcacagcgctgcaggtgagtgactccttaaaatctgcaccctagggcagggcatggtggctcacacctgtaatcccagcactttgggaggccgaggtgggcagatcacctgaggtcaggagttccagaccagcctggtcaacatggtgaaacctcgtctctactaaaaatacaaaaattagcggggcgtggtagcacacacctgtaatcccagctactcgggaggctgaggcaggaaaatcgagcgaacccgggaggcagaggttgcagtgagctgagattgcaccattgcattccagcctgggcaacagagagagattcagtctcaaaaaaaaaaaaaaaatctgcaccctaggtaccccacttgcctcaccatagccttggcacagcctgcgcctctgagactttctgtacctctgcggcgacactggccctttgcaagccccctggaacacatgccctctcccacttcaggggctttgcctgtgctgttcccactcttcagttctcagatccagcaccatcccctcagggaagccttcctcgattcctccaaccacatcaaattcagctataattagctctcaaagtgccagcactggctacaggtgaagcaacttgacttttcgtgtatcacgtgatacaagtttgctttggggagcacagaaaatacttgccctggacttggggtcactgtaaagcatcagtagcaagtggaagcatttgggttcctaaggtggactcacctttgcagtgaaattttctaggttcaagtcttccttcatcactcagtttgctttgtgacttcaggtaagacgcttgaacctctcctggcatcagtttccccttctatgaggatagtagtatcaacctcataggattgctgtggagataaaatgctttcctaaaaccccttgggcacagggaagaggaagggacactagaagagctcataattaccaagccgttacatccaacttttaatcctcacaactcgatgcagcaactcctgtgaatatccccatttttagagatgagaaaactgagactcagagctaacaggtggagaggatgaggattaaaacacaagccttttatctatggtgcccgtaaatgtttactcgcatggattccttggctcttgtaggaaacttcttgcaagtaaaattgacaataataattcccgtgccgagctcatcgcaggaagaggttaggcgggacagcccgaggcatgctggttgttgtagtctagcgttggcgcagtgcctgatgggagttgtagtacgtcccgcgcacacgctccctcgaagagtttctgccccattcctggacgtcacagccggtccccagagcaggattccttccggcgcctgcgcctgatcaccgctctgcgcttgagctgataaactcagctgatgggataagagtcttgttttatcggattttggggaagattaaaatggttaatagaactagagaatttagaagagggcttggcactaagtgcaatataagtattagctgctattattacctaatcctcaatgaaccttgcaaagtagctgttaccatttccatttgtgagatgagaaaactgagacttagaggagttagatggcttttccaaggtcacacaacaaggaaggagtaaaatcagttttggaatccagttctctttaccctgtgtcacccgctggctctcccgtgatgagggaggtggagcctgggaggttttgagctaaatgtgggcaggtttgcctttttacaaagtgcatcgtgctgccatgaggagacagggcgaggacacccaattgggcagcagcaatattggtagcagggaacccagagagaaggtgtattgggcatgtttaccgccattccagtcgccatggccccacatggcaaggtgggtgtttggaaactttccctcccctcataaaagctgaagagaaggttgggcgccctggttcacacctgtaatcccaacactttgggaggccgaggcgggcggatcacctgaggtcaagatttcgagaccaccctggccacaatggcaaaaccccgtctctactgaaaatacaaaaattagccgagcttggtggctcaggcctgtaataccagctacccgggaggctgaggcacgagaatcgcttgaacctgggaggcagaggttgcagtgagccaagatcgtgccattgcactccagtctgagcgacagagcgagactgtctcaaacaaaaaagctgaagaaaaagcctatttttgtcccctttcctccttcctacaatatgaggttgtaatggttagaattagaatcctgggtgatgtggctgagctgctgaaggaattgcagggctgcccaactgcagacatctgaagacatgagataatgtgcctgttgcttaagttgttcttaaaggtaggtttttgttacctaccaccaaaaagcatacctaatagatacaggaagctgacgcagtggttcggttgagaggcatgtagacctgacagatccacaatgtccattcgtgaactctcttttcaagtgggaaaacactagggctggtttggaatctctgggatgtaaaaggcatgagtagtttgaaaaagtatattcaaaaggtgaaaaaacaaaaattatataatgttatccacaaccttcaatttcctatttatagttaaggaacccccccaacctcgtgctacagtttttgtagcataagctgcagaaagtaaagctgacaaactgtcgacaggaaggactgtggacttgcagaagacagagaggagaagggatgtgtggttaacagagtgtgtgatgaggccgggcatggtggctcacacctgtaatcccagcacttagggaggccaaggccggtggatcacctgaggtcaggaattcgagaccagcctggccaacatggtgaaaccccatctctactgaaaatagaaaaattagccgagcatggtggctcatgcctgtaatcccagctacccgggaggctgaggcaggagaatcacttgaacctgggaggcagaggttgctgcagcattgcactccaggttgggcaacaaagcgaaactccatctaaaaacaaacaaacaaacaaacaaacaaacaaacaggatgtgtgatgcatttgctagtgaaattctatggcatttatgtggagtcatggctccctgaggtgtgtctagccatggcgctgagacatcttatttaatgtctgatgtagtttccgaaatatacagtcaaaaagcggtggggatgggtgggcagggggtcttggtgtacttcattaactcactctatcaatggacatctaagttgtttccattggcttcttctgatacaatttttgtaatgtcttaattttgtattatatgttacttctgtggtcaaggaaaaaggaatgaaaactggggtttggggcagggaggtggggggacaaaaaggatgtttccttaacgtataaagagcccttgaaactcattaagaaaaaataactcaaagatgacagttacagcaaatatttattgagcatttgccatattccaggaacatggtattttgcatataataatgtatttaatcttcacacctatcctatgaggtaggtaccattattattcccattttgcaggtgaggaaactgagacacagaacggttaagtaacttgcccaaagtcacaagcttgtaagtggcagaactgggatttgaaccctacactcttaaccaatgctaccctcccttccaagaaaaataggaaaaggacatgaacagatgaggaaatgcaaatgcattttaaactcacagtaagatacccaatctcacaaaacatattgtatttcagtgatttgaagctatacgtttttactttttttttgttttttttttgagacagagtctcgctgtgtcgcccaggctggagttcagtggcgcgatctcagttcactgcaacctccgcctcctgggttcaagcaattctcctgcctcagcctcccaagtagctgggattacaggcacccgccaccacacccagctaattatttcttttgtatttttggtagagacggggtttcactatgttggccaggctggtcttgaattcctgacctcgtgatccgcccaaagtgctgggattacaggcgtgagctaccacacccagccacatttttacatgtgaacttctgaaatcaggatgcatcttagaatcagtgacatcttagaatcaatgaaatacagtaagaggaatgcaaattaaaaccacctatcagattggcaaagaacaaaacatttgataacacgctgtgttggcaagggtgtgaggaaacagggactctgaaaacttgtgaacttaaaccggcatggcctctggaagacaatttggtatgcactatcaaaatttaaaacacactcgtggttcaagcctgtaatcccagcagtttgggagtctgaggcaggaggattgcttgagcacaggagtttgagacgagtctgggcaacaaagcaagacccccgtctctaaaaataataaaaaaaaattagctcagcatggtggcatgcacctgtagtcccaactacttgggatgggaggctgagagaggatagcttgagcccaggaggcagaggctgtagtgagctgggattgcaccactgcactctagcccaggtaatagagcaagactttgtctcaaaaaaaaaaaaaaaaaaaagtcaagtccattccatcctgaaggtggaacactatgcagctgtaaaaaataataatggtttgtgaacattaatgataacactatctccaaaatatattaagtgaaaaaaggcaaggtgcagaactgtgtgcataatatcctacatattgtgtgaaaaggagtggggcagacatacccctctgcctacataaggcattgcaagtgtcttgtcaaaatgatggcctctaaggaggggaactgagtacctgagggaacatgaatggggagcaatttacccttcattctagactagggagaggttggtaacttttctctgtaaagggccagatcgtaaatattttaggctgtgtggaccacgtggtctccgatgcaacgactcaattctgccactgcagtgcaaaagcagcctcggacaatatgtaaatgaggggcatggctgtgtgccaattcagctttacaaactggaatttgaattttctgtgttaggaaatattgttccccctcccccagccatttaaaaaatgctcgtggctgacatggtggctcacacctgtaatcccagtgcttcaggaggttgaggtgggaggatcacttgaggccaggagtttgagactaccctgggcaacatagcgagaccccatctctaaaaaaaaaaaaaaattagctggatgtggtggtgtccatctgtagtcctagctactcaggaggctgaggtgggaggatcacttgagcccaggagtctgaggttacagtgagctgtgattgtgccactgcactccagcctggacaacagagcaagaccctgtctctaaaaaacaaacaaacaaacaaacaaacaaacaacccacaaaagcttctgagctatagaaaagcaagtggctggatttggcccactgtccagggtcagcttatccatactctagccctgtttatattatttgatatgagccactgtacccggcgtgattcttattctttacctatgcaagcattacctattgcttatatagcaatatatatattgctatatatatatatatacccatatatatatgtgggtagcttgaaaaatatttttggtttatcaaaggagggttggctgggcgcggtggttcatgcctgtaatcccaacacttaggaaggctgaggtgggccgatcgcttgagctcaggcgttcgagaccagcctgggcaacatggtgaaaccccatctctacaaaaaatacaaaaagaaactagctgggggtggtggcacatgtctgtcgttcccgctattcaagaggctgaaatgggaggattgcttgagcctgggaggttgagtctgcagtgagcgcagatcatgccactgtgttccagcctgggtgacagagcaagaccccgtctccaggaaaaaaaaaaggcggggtgatggagtttcagttgggggcaggcgcccaaaggtatgtgcccaggccccttctaaagaacagtgagcacacaggggtatgcaagttcactacagctcccccggttgagctggaaatccatgtttgccctgcatgccactaccctgtgccaccaccagacagcagcacatgcctacctgaaaccaagccatcccacagcagctgggagggaggctgcaggcagttggcctatgcactcattttgttttgcccacagtacgttttaaacacggagccagcatttttaaagtttagatttctggctcctgtttaaccagctgctgtgagtagcagctgccctttaggcctgatgtctccaggtcatcccagtccccagcgtcagcggccctttctcaggcatgctgcagttgcctcatagtggacacatttctcacgtgccacctgtctcacctccctctccacaatgggagcgttaaagcacaggggctttgggtcagacgctggctcaaatcctgattctgccacctaccagctgtgtgaccttgggcatattacatgacctctgtgcctcagtttccccatctgcaaatggtgcaaagagtactcacttctcagagctgcagggactgcttgacaggacccatgccagagctctctgcacagtctggtgcaaagttaagtgctcagtaatattaagtagcattttcccctgtctggccctcataggcacttgtttgcaagtccctgatctcacaagtggccccaacactctcagacccaatgcagcgcaccttctggttttgagaaggatttttttccagcccccagaattcagaagtgaaatggtctgagtctgagggctgctctacccttactacctgtgggaccttgggggagtcactttacctctctggactcaggctgagggttttttttctgtcggctccaggggaactgacacagattggtggggcctggaaaccaacaccacagtggtgaggctactcctatggcctctaaagaatttagctgcctgtcccatccaccattgacttctttttgtagtaatgccttaggaagaggtgatcacaaccctgcaaatccagatggacatttttcagccctgggcaaccagagcatttcaccccactggccaatgtgattggttcagggatgggcacgtgacccagtccagaccaatgagagcctgccctgggacttccactgcaactactgggaatgcactttccactgagattgctgagctggtctagtaagtctcaactcaaagagaaaaacagagcttagagagaccacgttttgatgaatcatgtgagcccctgggtcctgccaaaccttaattcagaacacctgtagacttttccgttttatgagctaatacgattattttagctgtttactttaaatttctgtcatttatgagttgtcgaattctaacacccttccttgtgtggtcccctcaggcatagtcacaaatcaaaagtctagttggcaaaggaaaatggcattatgggtcacgttttaaaaaataaatgtcatggctggacgcagtggctcatgcctgtaatcccaacactttgggaggccaaggtgggtggatcacctgaagtcaagagttggagaccagcctggccaacatgctgaaaccccatctctactaaaaatacgaaaattagccgggcatggtggtgggcgcctgtaatcccagctactcagaaatgtcattatctgtgactgctctggagtcctttaggcatttccctgtccccaacaggctttcttttttctggctaatattgcagaaactatctagcctagactagctattgactatgtctgtagcgttcactacagaatcgcagtacctagttcataggagatgccttataattacttattcaacaaataaacaagttactaattggtctataatgtcctgacccggtgcagtggctcatacctaaaattccagcactttggaaggccaaggcggatcacttgaggccaggagttcaagaccaacctggacaacatagtgagaccccatttctttaaaaaaaaaaaaaaatagccaagccaggtgtggcggcatgtgctagtcccagccactcatgaggatcgtttgtgtccaggagttcaaggttgctgtgagctattacacctcacctctgcactttagcctgggtgacagagcatgaccctgtctctaaaaacatagtaataaatacaaataaataaaatgaccagcaggtccccactcacctcagcctatgagtctctgtataccaaatccatgttttcccaaccttgtcttccatttttccttagctcactctagtccagccacagtggctgcctcaccatctcttaaaatcccaagcttgttctttttttttttttctaagcgaagtctcgctcttatcccccaggtttgagtgcaatggctcgatctcggctcactgcaaccttcacctcccgggttcaaatgattctcctgcctctgcctcccaagtagctgggataaagtcgtctgccaccacgcctggctaatttttgtaaattttagtagagacagggtttcaccatgttggccaggctggtctagaactcctgacctcaggtgatctgtccgcctcagcctcccaaagtgctgggattactggcgtgagccactgtgcgtggccccaagcttgttcttgcctcagggcctgtgtacttgctgtcccatcaagaggcctcttccctcacttctttcgtgtctgacctcctctcctcccccaggtctcagctcagaggcccttcatgaccaccctgccaaagcagcaccgaccctgcttttccgctgtggttctgtcctgtttgattttcttcacaaatcaccacctgaatttccatgtgcatttatttgtttattgactcttttcccaggaggtcagctccaccaggataggtctttgttggttctttcaccgctgtacctgtgtacaggacagagcctggcacacaccaggtgccagtgaatatttgctgaaggaagtcacaaatagggatcagccatcattactttatcatcatgatcaacaggaaagaccactgtcctcacccaatcccctccaaaaggctttggagcagatgtcaacattaattcactgtctcaggtgacagctctcatcctgaggccagggttggggggagctgggaatggggcgagagtggggcctcacgtcccaggctccttgataccccccaccccacccagccaggaaacaccacgaggcagccaaggttaagtagactcttgctgctttgttataaatatattatgtacatccaaaacatgacattaaaatattactccgtgttacagaaaagatattaaggctttctattatttacattaaacaagcaagcacctttaaaaaaaaacaaaacaaaaaagccctactcttccttctctgacatactctggccagaggggataccgtgtcctcttccaaatgaccaagatgctctgcaggggctgtgccctgtgaagacatcttggtattggaaacatcagctctggcagggtgggggcagcagagaagtaggggtctagacttgagcaggaggttccagcctcttctggccggctaccctcagacccctgctgagcttcaccatccttgggggacaggctaggctgaaggtggtggctggggctgtccacctgcccagcctcccggggtcagtatgcagggctgtggcagaacaatgctccacgacgcttaggtgtgcctgggggctccccagaccactggggccagacaaggagggaaagaggcaactcactggccccaacgccagccacactgaagggctgcccagcggggcagggacggcaggcgtgcagggagtgggtaaacctcctctctaccaggggaggctggcagagtcaggcttgcagatagagcaactcaggtggctgaggaggggccgaggaaaaaaaaaaaaaagaaatgaaaaatcagtggctcaagtattctgtgtcatgaggggtgggctggggtacctgggcccagcccaggagatgtcctctccatctggaggggccagctcaaagaggctggaatttggcagatggcttcggtttgggggctagggaaggttggcaaccaggtagcaggctcggagaagttatttgatcttctgggcccatttcatgtcatctgcccgaggcttctcgcccgtcaggccctggatgaggtcctccaggcgtcgccagaagcctatcttctccagagggtagttgagccagcctgcagtagaaatggcagcgggagtttgaatgggagagagtagtcaaggggacattggaagagagctgaccttcactgggctggaggggcccaatgaggagtgagtcagtacaggataggacacagggaccggccaaggaactggaagtgggggcctcccaccaatgggcctggggccactcaggcctccaacccccatattcctctactttcttactatataccaggcacttacttatatttgagcacttactatataccaggcactgtggtggccttatcactcagctcaaatgctacctctgccaggaagccttccctgatcatccacttaagcagcaccccaggtttctcacattaccctttatctatctatctatctatctatctatctatctatctatctatctatcatttatctatctatttatttgagacagagtctcactctgtggccaggctggagtgcagtggggcgatctcggctcactgcaacctccacctcccgggttcaagtgactctcctgcctcagcctccgagtagctgagactacaggtgcacaccaccatgcccagctaagttttgtatttttagtagagactaggtttcaccatgttggccaggatggtctcgatctcttgacctcgtgatccacccgcctcggcctcccaaactgctgggattacaggcatgaaccactgagcctggctctatttacaatttttttaatgcagatggggtcttgtcttatataggctggtcttgaactcctgggctcaagcaatcctctcgccttggcttcctaaagtgctgggattacacgcgtgaaccaccatgacaggccaccctctttcatttctttatagcctttatgataacctgtaaccatcttcgttaattctctattttcctgttctgtgtttgttcaccccccaatccccaactggaacgttatccccaaaatgcaaaacaccatgttctttcactgctgatcctcagtgcttagaatacagccaggcgcagagtaggtgctgaataaatattgctcacaatcttacagccttccagctcaccatgaggtagatactaatatcagtcccattttccacatgagcacactgaggcttagagaagagtttcccaattagcaggtggccaaaccaggattggaactcagccctgcctaagtagttaacccatctcctaaatagcctgaattctaatccctccacctgccttccaaggagcacaaattgaggacatgaaaaagaatgtttttttgtggttctcagttctgtttccagaaagacctaaaaaaaaatagtagctgtaatttatcaagtacctactatatgccaaacaccgcatttgccattcccactatggccctaagaaggtgatatatgaaggaggcggctgcagccctattttgtaaggagaaaagcggtccccagggaggtttgtgagttgcctaaaggcacatgtggagaagctgagagttaggcctgagttagacttgacagcacctgatacacttaaccttgaaagcagcccagctggctccagagaaactcccagttcacctcacctctttcgcactggctgctaactgagcatggcacgtgggcctcctttcccttcctccactgcactgggcatgttcctgcctctggcctgctgcttcctgttacctttgctctaatctgtgctcatctatcttcagggccctcccacacttctctcctccctcttcagttgctctgcccccttctctcctccctcttccactgctctgcccgcttctccctcttccattgctctgcctcaactccagtcaggagcctctttgccattccggaaacacaccaagcaagcaaaggccagcctcagggccttcgcacctactgttcctgctgcctagagtgcctcccacagaggtctgcacggctttgtccctcagctcctcggggtctttgttcaagtgtcaccttccctgaccacccgatttaagaggcaaagcccccacttccttctcccacccctgctttattttcctccatagcagttagcaccattagccacgctacacattttattcattcgttccagctccctcactagatggtgagtgccacaagggcaaggatccgtgttttctggtttttttttttttttttttttttttgagacagtctctgtcacctaggctggagtgcagtggtgcgatttcagcttactgcaacctccacctcccaggttcaagcaattctcttgcctcagcctcccgagtagctgggattacaggtgcctgccaccaagcccaattaattttttttcgtatttttagtagagatggggtttcaccatgttggccaggctggtctccaactcctgacctcaagtgatccacccgccttggcctcccaaagtgctgggattccaggcatgagccactgcgcccagctgattcatgctattttgtttgctgcaggagcctacgcccaaagcaccatggcatgtggtaggtgctcaataaatacgggatgatgggtggctggaatcacaacgccatgaagtcgagggagagggctttgtcagtctcatttactgtgtcctcagcacctagaatagtgcctggcacacagtaggtgctcaataaatgcatgacctgagagactgttcccagagggcaaggactgtgtgacctcctgctgtgatctctgccctcctgacctcgaagatggtgcagtggctggggtggggaaagcccattccacgccactggtggccgcacctgtggtgatgcagaagtaggtctcgtggggtgagacgtggtggatgcgatggtgtttacgtggcaggatgacatgccagtcctgcaggagggtgacccagcgtggcagcccaaagtacgtgtgcgaccacttgtggatctggttggtgaaggtgccgaagatgatcaggcagaagacgaagcactcccaggggtatagctgctccagggcttctgcaggttggggagagggggggccggcacagctgtcactcgggacggggaacccaccccaaatggccctcaccacctgctcctgggcggctcctgagctgggcaagcacccaggattctcttccaccccctgcagggccgcaggcaagctcaggtgctgccctgggcttcaggctttcctcctgctcaggaagcaggcgtaatggtgtaataggataatggcataagcatggcaatggctgggaatgtagaccggagtcagctggagctgggttccgatctctgccgacatttcttggcagtatgggctggatcggtgactctgcctctaagaagcttaatttccccatcaggaaaatgggaatgatgccttcacccaggttccctagaagcggagcctgaaacaggttcttgtgcatgtgatttatcaagggagcctcttcaggaaaaaacctcgaagggagggagggaagcaagacacggcaggggaagagcagagcaaagatggggtgggtggcgtcctgtctcagtctgttcctgcaaggagctctgaggtgttaacggctctttagaattagacccactcagaggcaaagggactagcgtcggaggcgtttcagtcactggctccagccttatcccaaggagacaggtgggacctcccctccatccctggagaagctgggagctgtcagcagccaccactcacagaagcaggggctgggtgcacccccagggaaggggatgggcagggtgccatagcacccactacactacacgtcctcaccacctctacccaccggaggctgcctgaagaacaaatgggtgttaaggtgctggaacaggaccgggccccaacctacctccacctgacagataaggcaactgaggctcagagtggtgaaatcacttactttgggaccagtccctctaaaaataggcaggccctgttttcacagcctagacattttccactaggccacggtagcaaaaccccagaagccctgccaggcaggtaacacaaatgaacaaggtgggttgggtgcagggaagcaaggaatagtggggacggtggtaaactggaaagacgcgtcctgtcaaaggcagtggctgcagctcagctcccacccagtgaggccaggtgggaacatggacccaggggggccagagcagattgtgcaagagaagctggaaacctccatcttcatgtcaggtttcctgattttacatgaagacaatgaatgaaaactcttttaaaataccataaggagccaaacacataagccccagaaggctcctgggggtcggcctctgcccccaaggccccctcccagcccaccactagctgggtgtctcaccagggctgtgggtgcggaacttgtaggccatgtttagcagcggcagcagtgtcaccaggcagttgtccccgttggtctcgatgaagtcgtgccgtgtgatagctgtcgggtcaatgtggtgctcccggaagggtcggatgaaagcctggagttgagggggacacagccccagcagtcagcctaaggtggtcagctgctctccacagccccctaaacacattcaccctgggctcacctcccgcctttgatcctaagtttcctccacccgggatgcttgaacattcccacctggcccactgccagacacagaccccatccagcctttggggagatgagccgaaatgaccctggaagggctttgggttggcactgtctgcctctgggcctcagtctccctacctgtgctgtaagggggcttggagacaacctccgcccttcctccccaccccaaggcagttgaggaggtccctctaagtaaaaggtgggaccctctggaccccctgcacctgctggggtaacagcctcccctccttagtccaggctcttctgacaaggctgacctcgccccgggctgagaaagaacacgtgaccaggcctggccaatcatagcatctcctccctctagccagtgactgcctgagggcccagcacgtgacccaatctgggccaatgggagtgagccgtgggacttcagttggcggaaactacagggaaggagaaatgctgttctcctggaaggagaaggacagttctcttttcttgggagctggaaggatggatctctgggcggtgagaaagcacactggccaccttatgaggggaaagtagagatagagatggaagaagactgggcctgaagaatgtggtctgtcggtcctactggatgcagccattccttaatttggctctaaccctgaaatcttcagttacatgaatcagtacccttgtttgcctaagccagtttagattttctgtcaaaaccaaaaaagtgactaatacaggataaaatgcagttaaaacagcaagaagcagcaggggagacaatggaaaagcaagacacccccaaattcaggggttctgatgaggcaggcacatatctaaactcttggaccatcccaagcctgatgcttttgcttccaaaatcccaagggactcctgttctagtcttgcagcacaggggtgagggacaggctgcaatgatggttcccatctttcagatagggaaacagtcttagagaagaaaggggactcactcaaggccatacagcccaacctccttcttgaggacatggttaggtcaacatactcaccttccccacaatgggcagctccacagagccccatgtgtcagcaccccagtgtaccaggccagacaagaagtcagcaatgagagcccctgcaactgtggacaagagggtgagtgaagggacatccctgcacccccccaatcagaatcactcattcatttactcacttgcccgctcattcatttgttaggaggggaaggtgtcccttcttctctagttgggatgttttcttccctgaagatggagcctcaggcttaacactcctcctgcctgttacttgctgtgctcggggagatgccaagactcatgtgcttggagagtctggagagcataaactgggcatgctcagatcagctcaacctttccctattaggagcaggctgtgcccttctctctgccccatataaggaaagcctgctctgcaccagtgctgcctggaactgcagcaatgtccttctgggtttggtgttagaaagaaagtacctcggccaggtgcggtggctcatgctttgtaatcccagcactttgggaggctgaggcaggcggatcacttgaggtcaggagttcgagaatagcctgaccaatatggtgaaaccccgtctctactaaaatcacaaaaattagccaggtgtggtggcatgcgcctgtagtctcaactactcgggaagctgaggcaggagaatcacttgaactcgggaggcggaggttgcagtgagctgagatcacaccactgcactccagcgtgggtgacagagtgagactccgtctcaaaaaaaaaaaaagaaagtaccttacctgcagatagaagcctcgctgctccacccccacccctccagcttttatcagcaataaacatgatcatttggtctccagcagccttttccttgtttctgttctcaatctgttcggaacttgagcagggttccctcagactccaacaccattcactcacttgagggttcagtagatttggactcaaattccagtgctggcactcactagctgtgacgctgcacatgttatttagcctctctgtgcccagtttcctcttgtaaaatgggaatgatgcgactgggcgccgtggctcacacctgtaatcccagcactttgggaggccgaggtgggcggatcacctgaggtcaggagttcgagactagcctggccaacatggtgaaaccccatctgtactaaaaatacaaaaattagccgggtgtggtggcacacacctataatcccagctactcaggaggctgaagcaggagaatggcttgagcccgggagatggtggttgcagtgagtcgagatcatgcactgcactcctgcctggccaacagagtgagactctgtcttgaaaaaataaataaataaaagggaatgatgctaacatttacgagcactttctcaatgccaagcacaaatgctttacaggctagatcttgatgaattctcaccatttgttttaagttggtagcttttttattcccactttatagaggtggaaactgaggcttccacccctgctgcctcccatcactctcctctttcgctgcagcccaggcctactttatctcctttcccttgcatgcctctgggtctttgcatttgctgttccctctgcctggaacattctttcctaagatgcaacacagctcactccctcacctcttcagatgtttactcaaatgtcctccctggacacctgatggaaaattgcaaccacctcatcttccagcatttccgatctcctatgtatattgttctccaagcactcggcacctctgactgctcttgtgctggtttattttctcccccaacaaggaggttggctccaccatggccagggctttagtctggcttgtggctgcatcccagctcttggcacctattcagaactcagtagagcactactaagtgcagtgtttggcacatagtaagccctcaggccatattactgttgctgtcattgagtcaatcaactaagccacactccacaaaggcctcctgtgtgataagctctagggacagaaacatgtcagacactgaacacatgtctatggggaaacgctgtaaagtccagcagaggacaaaggcagctgtgagtgatgacacgtgtggccccctggctcatggggcttcagacaaaccccttcccagactcggtttgtctgtgtcaactggttgtccaagattctgagttctgctggtgccctcaaccccttggtgacaggggaccagggtcttgggggtactgtggagactgcagaaaagcccctggatgcctcctgggtgagtgagacttgtggttgaagggacaaaagtaagcacgcaagtcactgtgaatgtgcaatcctgacgtccaggcctggggtgaggggcagccactggatgccgactttccagaggccctgtggtatccatcacaggtgccaagcacgggaggggtggtgggggtgggggcagcacagcttcatgcaggcacctgcaagttcctggggataagggcggaagggcaggtggggacaggtggcagctacacctcctggcacacagacgcctaaggacaggctgaagggtgtcactgcacagtggctgggctgaggtaaaggggttgggactcagcaaggccccagagcctgtgcacccagtggccctgctctggtctgggcagtcttgcccatttgtgatggggagggtggacccaggccaggggcaggggcggggatgtagaaggcgagggaggtggaagccccagaagggcttctggattttctgttcctctacacagcaccccacccccactccagatcccctgtgctggctcctcctcggccttcttgctcagagcgaaggtcagccaacccttctggctaaagccatccttccgggcagttgctctcgctcacatctccctgcttcatttctttcatggcacttgtcatcccctgagatggcctcatttgtcatcccttcttggatgaagaaagaggcctggagaagttgaaccactgcctcccagtcaagtggcctggaaatggcagctgtgggatgggaagaggcctgtcgacctgcctccaaaaccagcacccttttgtgtccttaaactgcactgcagcaggtccatggcattattagagctcctactgcatactttgggatgctgtgtatgcactgcctctgtctaccagcagggacaaaaggccatgtggccaagagctatgacagaactagatcaagtgttgggggcctcagctcttgctaccatattgctgtgtgacactgtgcctactctaggcctcagcatctttacttgcttaatgaggtcaactgaggtatctcgaggtcctgtccccatagctcggactaatgacatctctaaatgctgccttcaggctgggctggagcacagtgcagagctgcagagctggcaccattgcactcctcccagcactttgggatgccaaggtgggcagatcacctgaggtcaggagtttaagactagcctggccaacatggtgaaaccttgtctctacaaaaaacacaaaaaattagccagggatggtggtgggcacctgtaatcccagctactcaggaggctgaggcaggagaatggcttgaacctgggaggcggaggttgcggtgagccgagatttcgccattgcactccaggctaggcaacaagagcaaaactctgtctcaaaaataaatgaatgaatgaatgctgccttcatgaaagaaatagctacagaggagaagtggctggatgtcataagggtggggcctcgcaagggattcagagtccaggttccttgttccccgagttctgggctcctgatgagatggggacaagccccttcccctctctaaaccttggctcattttatgttataattgaatataacctacaaacagtaaaggccataggccttacacagctcacagcctttttatgcgtagacacacctgtctgaccaacccccaggttaagatagagattctatacctacacagaatataagaggttggcaaactttctttaaagggtcaggcaggccgggcacggtggctcacacctgtaatcccagcactttgggaggctgaggcaggcggaccactggaggtcaggagtttgataccagtctggccaacatggtgaaaccccgtctttactaaaaacacaaaaaaatcagctgggtgtggtggtgcggacctgtagtcccagctactcaggaggctgaggcaggagaatcgcttgaacctgggaggcagaggctacagtgagcagagctcgtgccactgcactccagcctgggcaacagatggagactccatctcagaaataaataaatacataaatggacagtaaatattttgggctttgcaggccaaggcagtctccactgcagctcctcaactctgcagctgtagtgtgaaggcagacatcaacagcattcccagaatacctgtttacaagtgtttttggtcctcaggccatagtgtgctgacccctgatagaaagcatttccaggccgggcacggtggctcacatctgtaattctagcactctgggaggccgaggcaagcggatcgcctgaggtcaggagtttgagaccagcctgaccaacatggagaaaccctgtctctactaaaaatacaaaattagccaggtgtggtggcgcatgcctgtaatcccagttactcgggaggctgaggcaggagaatcacttgaacccagaaggtagaggttgcggtgagctgagatcacgccattgcactccagcctgggcaacaagagcaaaactccatctcaaaaaaaaaaaaaaaaaaaaaaaagcatttccagccccacagctggctcccctgtcccactaagctcccttctgaccctgttccatgcaaccatagagctgcctcctatcagcagagactgattttgcctattctagaactttatttaaacggattcagatggtaggtgctctttggagcctggcttcttttactagtgtaatgtttctagcgtgggccatgcagtcgtgcggatcagcagtggttcaccatttttagggctgagtatcccaccatctggatgtacaatgatgcatttatccacctggccatggttggccatttgggctgtttccagtctggggctgttttgaatctgctgcagtgaatattggtgtacaagtctatgtgtagacatccaccctcatttactttgggttaagatgtcaactactttttttaaaaaaaaaaacctgatatttattgagcacttataactaccaggccccgtgccaacgccttaaatgttttatctcctttaatccctgaatggcatcaaggcctcgcttaggccgaatcttatctccttaatcattctaaacacttaatcctcacagataatgagaaagatgagcataataaaaattatacagatgagaaaacagtagttgggttaacactgtgtactggggctttgtgaagtgttaagaagtgcatcactgggagcataacttcccattccttaagtgtgggctgtgtacagagacctccttccaaaaagagcacagtatgaatgaggacggaggctgggcgcagggctcacacctggaatcccagcactttgagaggccaaggcagatggatcacttgagttcaggagttcgagaccagcatggccaacatggtgaaaccccatctctactaaaaattcaaaaattagccgaccatggtggtgtaggcctgtaatctcaactacttgggaggctgaggcaggagaatcacttgaacctgggaggaagaggtagcagtgagccaagatcgtgccactacactccagcctgggtgacagagtgagactctgcctcaaaaaaaaaaaaaaaaaaaaagaggggaggaaggctgggcgcattggctcacgcctataatcccagcactttgggaggccacggtgggaggattgcttgagtcctggagttcagtaccagcctgggcaacacagcgaaaccctgtctgtatataaaataacaaaattcgccaggtgtggtggcatgtgcctgtggtcctactggaggctgaagtgggaggactgcttgagcctgggaggttgaggctccagtgagtcgtgatcgagtcactgcactccagcctgggtgacagaggaagacttcatctcaaaaaaaaaggcggggtggggggagcagagtaacttttgtttgttgtttttttgagacagactctcccactgtggcccagactggagtgtggcggtgccattcacagctcactacagccttgagctcccatgctcaagcgaccctcccacctcagactcgtgaggagctgggactacagctgtagagacaagggtctcaccatgttgtccaggctgaccagtgaactcctgagctcaagcgacccactcacaaatcctaaagtgcctcccaaagtgctgggatgacaggcgtgagccaccgcacccagccgagggtaacttaactgtggagaactctgacatctgctaccttagtcatgggatcagagtcatcacagtgataagtcatgttgacagtctgtacttttgctatgatgtgatgaaaatggcacttcacctctgaactcttcctcctcataacccgtaaccccagtctaatcatgagaaaaacatcagatagataccaacagaggggcagcctacaacacacctgactagcactcctcaaaaccgtcaaggtcagccaggcgcggtggctcactcctataatcccagcactttagaaggccgaggagggtggatcacaaggtccggagattgagaccatcctggccaacatggtgaaattccatctctactaaaaacgcaaaaattagccgggcgtgctggcgcgcgcttgtagtcccagctactcgggaggctgaggcagaagaatcgcttgaacctgggaggcggaggttgcagtgggccgagattgcgccactgcactccagcctggcaagagtgagactccgtctcaaaaaacaaacaaacaaaaaaaactggacaagaggagcctaaagggacatgacaactaaaggccatgtgataccctggatgggatccaggaacagaagaaggacattagggaagaactaaggcaatctgaataagccatggactccagctcatgataatgtatcaacactggcacacactgtaacaaatgtgccccgctaatgtaagatttaggatgtgaataatggaggaaactgcgtgccccaggcatatggggactctctgtactatctgccccatccttctgtaagttgaaaacttgttctaaaaaataaagtctgtttttcaaaaagtggacaatctcacttcatgtccacagtaacaggccccaccccatcctgaccttccagaggagggtaagaactccccaaggtcacacggtggcaggggcaaggcagggctgctggtgagtagccagagactcgctagagtcattcaggatgatgcaaccttagggttagggttagggagacttcgcacccaggtatggagaatggggacatttacctcccttaactatgagaagttaataaaatgggctgctgggtaaagggcccggtgggtcccacgacacagcaagcatccccccaacgcagctcctgtgagctctctgctgagcctcagtcttgccatctgtccaatggtcaaggcctggcgcctgcacgctgcccagcagggagggatgtctgctttggacagaagtcaggaatcatcttaggagaccaggagccctccccctggctccgtgatcttgcggcctctgccggtggcagtgactccaggctgctgtctgaggctgctttaatgggggcaggggtggcagacaggcacacagaagcctctttgtcccagctttggggtggtggcagctggcagccggctccccctgggggcagcttcggcttggttaccacccttccccgcagaacactgggacaaggagagggatgggagacggctcaccccaggctaccctgactcacgggggaacttgaggtagtcgctgggcccgtgcgggcttccatttccccagaggtcacccagctgggacttcctcacccctccctgcccacctcaaaggcctggcgtggagatggaaggcgtggctgaggagccaagtgaatgcactgagggcaaatccatgggtttcggtcctgggtcccagtcctgtctctaccgccttccagctcagtcagatccagactccacttccagccacaggacgggccacgacccgagcctgggacttctctgacctcatccctgacctctggactcactgtgccctctgcccggaaggcttctcccaaggtccacgaaggactctgctcctttaagggccaactcacaacccaaacacttcctcccccttctccacgtggaacaaaagctcagggctcctacggccttcacttgttcacccactcactcacgacaacgatgtgcgtgtcacagtggctgatgacctccacgtggctaaatccaaaggtccctttactggccaccttgctggtccactcggtggctgttcccagtcgacccccaagactcctggaaacacattctcctcttggcccctgcaagccctccctggttctcccccgacctccctggttctccccccatctccctggcagcgccatcccagcctcccttgctggctcttcctcctccccagcctggaaacacgggagactcagcccctgggggtgctcagccagcctaggagataaggagcttcatcttgacacagatgacccccggatttctttctttttttttttttttttccagaggaagtctcactctgtcgcccaggctagagtgcaatggggcgatcttggctcactgcaacctctgcctcccgtgttcaatcaatttctcctgtctcagcctccccagtagctgggattataggcgcctaccaccatgcccagctgatttttgtatttttagtggagacagggtttcaccgtcccaaagtgctgggattacaggtgtgaaccaccatgcccggccggacccccagattgctatttccagctgcctctccctgcctccagacctagatttccagtttcctgctcaacacctctccttagctcaacagcggccatctcaagcatctccctcaggcctgctctgccgatgacctctctccatctctgtgaatgacagcttcatcccttccatctctcaagagagaaaccttggagtcaagctaattctctctcacctccacagccaacctggaagcacattctggcagctcacctttcacagctcctccagaatttgacaacgcatcaccacctccaccgctccacccaggtctgggccacccttaggtctgggctgccatcttcacgtggctggaccatggcaggcgcctcctccctggctgtccccacccccagccatcttccctgcagcatcagatgatgtcaactccctgtgggaaactcaccaatggcttctcatgaccccatatccagaccaggccctcatggccccacaacatctgcttccagtgccttgctgggctgccacaattttcctttgatcaatttcctccagccacaatggcttcgctctgttccccaaacacacgaggcacgtgccaacctcggggcctttgcatttgctcttccctgtgccttggatgcccctccccaagatctctgcacggcccctccctcacctccttcaggtctctgtgcaaacgtcatcttttcagagaggcctttcccgcctacccgcttagcttgattttgcttcccaatgctgcatcacgtgtgtctgtgtttattaactcgacatcttttcgtgcttctgccttccttgatttctgggacctgcctgggacagtggaagctctggggagataggggtagggggcaggctctgcaggctggcacagtgcccttactgcctgcatgttaacacacaaatcggggtggctatttaaatcgattagggactgtgcaaacaccattatcaggggattgtctgctctcatcagcccagagagaaatgtgtgggatggggaagctggtgctgtgcagcctcgaaagccagagatttcctgggctgtggctggaagatcagatcccaaccagggaagggagatagtgacctacctgggacatccaccctcccagcctgcacagcacacacctgggctctgatccagcccatcctttacccccgtagaggcctgaaacagcctggcctcccaatgttaactggaggctatacacgccctggtggggaagtcctcaactgagagccaggcaggtctggatttgcaatctcagactctgctgctgcctgggtgaggaccaatatgtgacttacttagcctctcagatggtgatgggaacctcctcactagggtagcacaaagagtgaaaagtgcccagcatggggcttggcacatagtaggtgctcacaaaacatccgtgattaaactgaccagcgaggctgaagtgaaagccttgatcagtggtctggcaggtgctgtcccctccccgcccctgcttagtcactggttttctcagcacttaggcacacctgcattttgccttcacaacagccctaggaggcaggtactgccagcagcctcatttacactgtggtaaatgaggctgagagatgcaatgtggcccaaggccacagagccaggaggtggtagagctgggacttaaacccaggtttgtagaggcctgctcgtaaccatccccagatgaggctgcaaagctcagactgtattcctgcccttgaatatggggcttgaggcagagaggctgggggtgcaggtctctcccatccctgggggcaggggacatgcctggctcctgcctgggcttcccagcaatggatgggttcatctctctcccctccagctggtccggcccccgtccccagcatataccaaccccaccccagacccagatggctcaattagctggcctgagcactattggcttaggtggctagaacgcttttaatgagattgtgggagttgaacccttaggaagggccaggcaggaccaagggcacagccgcccccttcagtcttggagccggggatggggaggggaagggtggtgcatggagaggaaggaaactgagtcatccagggcctgggagtggagatagtgtattaacaactatgttgtactctgccttgaagtgtgactctggactagtcccttctctgagcctcagttccctcatctggaaaatgatgacaaccttagcgtaagaagtgaccgatggaaaacaccaggaggtactaataaacaacagctctctcatttattcattcatcaattcaaaaaatactgagcaccggctgtgtgccaggcctgaggcttgagctagggacacagcagtgaatgaaacagacaaaaatctctgctctcagagagctggcatttgagttgggagagatgttgggagagatagatgataaacaaataaagacactgtggacacagtgttaacaacagaaaagggggatagtgtgtgacaggcctgctattttgagacggagtctcgctctgctgcctgggctgaagtgctgtggcgtgatcttggctcactgcaacctccgcctcctgggttcaaatgattctcctgccccagcctcccaagtagctgggacctacaggcgcctgccaccacggccggctaatttttgtatttttagtagagatggggtttcaccacgttggccaggctggtctcgaactcctgacctcaagtcatccgcccccccccccccgccccaacggcctcccacagtgctgggactacaggcatgagccaccacacctggctggggctgctatgttttgtggggcaatcacacctcctctgctgagaggaggtgacctctcagcagacacctggagtgagccatgtaggtgagagttctaggcacagagaatggcacatgcaaaagccctgaagtaggaatgtatctgagagcaggtgacagacgcacagtcagggggccagcgtggcaggtgcagggtgacctagcatgagggtggctagaggaagctggggcaggtacactgaggagccggtgttctattcagctgcagatgtatgcagatgagagtgggggagtggcatgatctgcctggggctctagcaggatccagctagccatgtggagactggacggtgcagggcaaaggtgaaggcagggagaccaggaagaaggctcctgaaacagcccaggcgggagaggatggtggctggacaagcgtggggaccatgaaggtacagagccatggctgtactcctcatgcagtttgaaagtagagttaacagcatttgctgatggtttggatgtgcaatgcaagaggaagagaggaactgaggatcatgtttaggttttgggcccaagtgacaggctgcagggaggtgctgctgactgcaatagggaggtggggtactcaaggcacatactggactcaagcacacacatccatgcatgtggacacacacacgcgccagttacccggtgggtccctggcccctagggaagttgaggcaggcagcagtgcctcgggcactcaccaacaccgagtatgacgaggggtgtgtcctcccagcgggccagcagcaggagatggaccaggttgtgggcgatgaggctgaagcacaggatcacagagcaccactcctggaggcgcttgcctgcagggagcagaggcgagaggtaaaggctggaaggtcaaggccaggcagagtgtggccccatgggaacttttcttttcttttttttttttctgagacagagtctcactctatcacccaggctggagtgcagtggtgccatctcggctcactgcaacctccacctcccaggttcaatcgattctcctgcctcagcctcccgagtagctgggattataggcacccgccaccatgcccggctaatttttatattttttagtagagatggggtttcaccatattggccaggctggtcttgaactcctgaccttgtgatccgcccaccttggcctcccaaagtgctgggattacaggtgtgagccaccgcacctggccaggagcttttcaactttgtttaatgcatctatattgccaaccacaagctgagcttacagactcccgcaaaggagtctgtacccatttcacagatgacgtcactgaggccctcaccaaggtcaaacagtcagggctggatgcattaaaccaaggatggggcccttcagagagtggcccaattctctgacagaccaattctttgacagacaggaccagaactctggtctcctgggcccctctgggctctctctggagacacctaagggaactttaatgagcttctttttctttttttaaagtagaatctttgtggcttcacttgtccccttttgcaggtaactatttggaggcagaggctacaaacaacctttaatcctggtggctcacaccctgcccagcctccctcaagcaggctccagacaatgagtcaggaattcatggacaaatagggctctggggcagtggggcttctaaaagtatggcgtgtgggccagggaggcagagcttctgattcccaagaggagccagaagtcaggctttgggtgtgcaatctgtttcagtgttgccacatagttttcacagacacacgagcccagacaagctgattcactcgctgcagctttgtttgtggtgtcaaaacttgggaaataacctaagtggccattgcctggggattggccaaatgaattcagtccacatcatctctgcagccaggaaaacacctgggcagttgtctataagtggacgtggagagatgtccaggacatctaggtaagtgcaaaaagcaaagtgccaaatagcagccatttatgttaaaaaaaaatctatatagttaagaccggcttttcccttatttccttttaaagtactagcatattacattgttttcttttaattgtaaattaaaataaaaaaataaaagggggccatgcatggtggctcacacctgtaatcccagcactttgggaggccgaggcaggaggatcatttgagactaggagttcgagaccagcctggccaacatggtgaaaccccatctctactaaaaatacaaaaattagccaggcatgtggcgggtacctgtaatcccagctattcgggaggctgaggcaagagaatcacttgaatctgggaggtggagattgcagggagctgagatggcaccactgcactccagcctgggcggcagagtgagactccatctcaaaaaataaaaactaaaataaaaataaaaataaaataaataaaaggggttaggcccagtggcttactcctgtaatccaagcaccctgggaagctgaggcgagaggattgcttgagcccaggagttcaagaccagcttgggcaacatagcaaaaccctgtctctattaataaacaaaacaaaacaaaaaattttaaacattaaaggaaataaggccgggtgcagtgtttcacacctgtaatcccagcaccttgggaggccgaggcaggcagatcacctgaggtcaggagtttgagaccagccaggccaacgtggcgaaaccccatctctactaaaaatacaaaaactagccaggtgtggtggcaggcgcctgtagtcccagctactcgggagaggcaggagaatcgcttgaacccagaaggcggaggttacagtgagctgagatcacgccattgcactccagcctgggtgacaagagtaaaactccatctcaagaaaaaaaaaaattaaaggaaataaaaacaccatgtgggtgacatagaacatgtgactagggtatgccccaggcagctgctccataaggcacagaagacctttaatgacaacaattttatcatgggtgtttaaaatatactgagcagttactacatatcaggcgcctgctgaagtgatgtccttttgcagatgagaaaactgaccatcagagtggtcaaggaagtagcccaaagccacccaactagtcagcagagaccagaattccatggccagaggtctggctcctaagatcccgctctcgccccgctctatcctgttcctgctgcccctggtccctccctctattccccatcaccctatcaccttgacgacattctgggtcaggagcccaggcccccacttaagcagcggggccaggcaggtccctgtgaaggggtcagggccagagcaggtgagaagggctcctcctgtgtccaccctctcttctttttaggactctgtgcatgctgttctcttcactccctgtgcacctgacactgttcctgcagatctcaccctggaaacctccatctccaggaagccatccatgatgcctcctctgaccccacactccccccacacgaggcccattgctcatgcctgtggccttgtctacgtttgtctttccctacctaaatgtgaagtcgggaggcccagaaccatgtctggctcactcaccagggccctgacactcagtaaatgcttgcagaatgagcaaattcccaaccacaatcctaacggacaactccatggctttgtctctgggtgccgctcaccgacataccttgggaaggaagtactgggttccccatttgtcatgatagggaaactgaggctcagggagagagaaggccttctccaggtcacacaacagcaagctgctcctgacctaccctgacccagaaccaggacagctgccctcccctgccccttgaaaagaccaaggctcagaaggggaacggaacacaccagggttacatgcccttggctccttttgtgcagaagaagaccgtgaagcccaggaaggagaaggacctcaacagaggtcacatagcagaggtcacaggggcctagatctcctggttccccaattctcaggcgagggctgtttctcttgagccacgcagcacccccactgccccagcagccgccccagcctggggatcaccatgatcaggcccagcaaggccttcccctttctgattcttgtttgtagccaaggcccagggctcagaagcagaaaaccccgagtgggtggggtgggaggacacggagaggcggtgagaaggaaagaacaagtgaaccttcccgatcgacctgcctgcctgccccacagcatgcagggacaggaagtgggcagagccaactgcaacatgatcaaataacagttaccctaacaatggctgacacacactgaagcctgtcatgcgctggggtgtggcccatatcggagaggttgcaaactgactccctctgacatgttttgccctcagttttaaaaagtgagctaaatttgaaaatcacgtaaaattcctagtttcctgcttccctcaacaacacagggctctggccaccctaggcctaaacaataagtaatagctgcccccatccaatgggatatgagctccaggttcaccctggtcctctcccttccctggggtctcacactgggtggccagatttggtggcagccctggctgggcccctgcagtcatctgagtttttgagtctgaggcacagtctctcattcaagtatcagcccgtcaaggaaggaactgagtgatctcatttcctagacaaggaaactgaggttcagagctgggtttggatcccagacacatcaatgagacatgttagcctggacgttcggggcagtcctgaaaccaaagatgatccagctctctccccacgccatggagaacgtcctccaaatctgaatatttttccatctaaactccatctctctttggcctctggaagctggatccttctgcagaccaaataccttaattctcatccataaagaatgcatacacaatggccgggtgtggtggctcatgcctgtaatcccagcattttgggaggccgaggtgggcagatcacgaggtcaagagttcgagatcagcctggctaacatgaacatggtgaaaccccgtctctaagaatacaaaaattagccaggtgtggtggtgtgcacctgtaatctcctagctactcgggagggtgcacctgtaatctcctagctactcgggaggctgaggcaggagaatcacgtgaacccaggaggcagaggttgcagtgagccgagatcgtgccactgtactccagcctgggcgacagagcaagactccgtctccagggggagaaaacatacacaacttaagtagctttcactgagcaactggaacatgccagatacagggctaagatgatctcagcacccctcaccacctcctggagctagggaccctctgtcccatccttcagagagagaagctgggcctggagaggtcaaggcacttgtccaaagtcacttgagggtcaccaaagtcacagcatggatcatcagcctggcagggcctgtggggtcaactggcctaaactgtatcacttaacagatgagcagactgaggtggggacagggagggtggctgctcaggacacaggaggcccgggctgtcttctggctgtagtgctgaggtcctgctatcagagccagcccctggcttggcagggtttgaagatctgagccaaaagcagtagccacttattggcctgaggaaggggctggcctcgtgtggtaggtatggggagctaggaagagcaggggaggcctggggtcatgcctttgtcatcctgctttccaggggacaggctgcagtcaaaggcttggtgggcccaactcttctggttccaggcagagacaagccccaaataagctggacttctgaggacccctggcctccagcagaccctcagcctcagggagatgggggacaagaggtagagagaaggtggggatgagagatggacagagggacaaataagagatgagagacaaataaggaatcagagccatgggaagatgagaaacaggctgagtgccgcggctcatgcctgtaatcccagcactttaggaggcaaaggtaggaggatcacttgaggtcaggagttggagaccagcctgggcaacataactagatcctgcctctacaaaaataaaaataaaaattagctgggcgtggtggctcacacctgcaatctcggcactttggaggctgaggcgggaggatcatttgagctcagaagttttgggttgcagtgagctgcaatcgctccatcacactccagcctaggtaacagagcaaaaccttgtctcaaaaacaaacaaacaaaaaaaccgaaagaaacaaagatgagaaacagagacaaaaggagcaaaaaacagaaagcccatctgggggactgaacccctgggttcagctttgggagtacaggccaggactctcacccagtactcctgacaccctccacctttcccttccccctgtgccaagagcctctgtaatccccagggcagggggcacccacagttggcctgggtggggtacaggtggatcaaggaccgtgaggctgcacccatgaagcctggggcacctgagaagtagcacacacatggccagatttcagctgggacctcctgggaagctggacacccgcctcaccctctggcctgccaagctggccaggcccttcacaaaccctgacatctggcatgaggtgggctgctgctgggaaactcagcccagaacaggacagaacggctcctgggtcctgcaggaccagggctcaacctctgggccagacacttggggcctgcgaaatcaggctgtggccgcctccctgctgcacctgtcaccattccctcagccccatgctgctctggtccaactactcacagctccctacacacagaggcccattctctgccacctgccctgcacacatgctgttctgatgatccggaatactcgcccccacctcccacacactcacccctggctggctgacttccatagtgaagagtaagaacacagaacctagcgcacccccacccggcccagtcccgggttccaggcctagccctactgctgcccggtgccccgccgtatgacctcaggcagcctctcccattttctaagcctcaggaaatgttccaacaaaagtggactgggtgctcatgaggggccaagcactttaatcaaaccaaataggttcagtccctgtcctgctggccttcccatcaggtgagggcagatgcgggcctaaccccgatcagggtgagctttaggaagagcatgcctggggtgggggttgggaggggttgcagcctcctcctctgtgaatgcagttaatatcaaggtacagctcacacggttgtagtggggatgcacggagagcaggtgaggaaaatgccagcacagtgaggctcaatcactcggctatgttgattgccatgattatggctgtcaactgtcacagtgccaaaccacctccagccccagtaatctcaaacattctgctcctagaacccaggaacttcttctactcttccctccagcctacatgtgtcctccatattccctaaacatgcctggcaagctcccacctcagggtctctgcatttgttgtttccctggtctggaccaacccttcttcaaatatcctcaaggctccctccctccagtccttcctcccttcaggcctcacttcgaatgtcacctgctcagggaagccttcactgccccctccctaaaatgtcattcctgtccccaacatttcagatccccctctcctgctatgtatttgctccacagcgcttgccaccactgggcacgtgagacagttatttgtcaagtttatggcccggctatttactaaaatgccagctccgtttttttctttttctttttttttgagacagagtctcgctctgtcatccaggctggaatgcagtggtgtggtattggctcactgcaacaacctccgcctcctgggttcaagagattatcctgcctcagcctcctgagtaggtgggattacaggggcctgccaccatgcccagctaatttctgtatttttagtagagtcggggtttcgccatgttggccaggctggtctcgaactcctgacctcaagtgatccacccacctcggcctcccaaagtgctaggattacgggtgtgagccaccgcgcccggccagctccatttttttctgtcttgttcaccattctgcccccagagcctagaacatggactagaacataggtgttcaatatgcactgagcctggtctctcactttttcaggcccagagaggtcaaatacttccccaagatcacacagtgagcagatagaagcagagaggccagtggaaaggaagttggagaaaccagtttggcaagtctcctcccctacctccaggtctggaggagataaagggccttgattgcagatttggggcaccaggctgtctgcagactctgattcaggcatggctgttcttcagagagtgaagggcacttggggaaaccagaaatggacaaatatgcaattgatcgtggtggagtggggaaacagcaatccctggggaggctcagaatgcctgggaatgatttgggctgtctgaaagtaggtagggttcacaggagcaggcagagctggacactaaagagggaggcccttgaatccttatccccaattcccaggtggggagtttgaggaccagagaggtgaggcggatcccccacagcaaaggtcagactactgttaacaacagggaggcgccaggcacagtggctcacgcctgtaatcccagcactgtgggaggccgaggtgggcggatcacaaggtcaagagatcgagaccaccctggctaacacagtgaaaccccatctctactgaaaatacagaaaattagccgggcatggtggcgggcgcctgtagtcccagctactcaggaggctgaggcaggagaatggcgtgaacccgggaggaggagcttgcagtgagccgagatcacgccactgcactccagcctgggcaacagagtgagactccatctcaaaacaaataaaacaaaacaaaacaaaaaacaacaaaaaaacccacacaacaacagggagtgcctactgaatgccagtggacgatctcatttccacttcctaacacgaaggggcagataaactttaacttgcaaggaaaccaaggggaaacagagacggaaagtggcttggaccaggtcatacagctgaataacagagtcaggatgttaaccctggcctacccccaggagagcaggaggttttaagtccataggctgggtgtcttgggtataggcctgaagaaaccatagcggcatggaccaggtgcccaagtcaggtgtgaaaaatcacatacagagaatggagtggtctaggacccagtgaggaaatgcaaatggtccgtggccatgccgccttttaaggaagagacggcatggaacccaggccagtgagggcagaaagctaaggtgctagtgaccccaggcccactccaggcaagggctgcatgtggtgcttggtggctgccccacagaaaaaggaaggatgtcaggatatttgacaaacaaagcttcattccatggtgacacccaggtagaggtgcctcccagtcacctgaaccaggagttctcaaaggcacttccttaactcctggggatatagggccctcctgaggccaaacagtaaaattcctagggctcacgtaggagtcacaaaagtgggtgtagggggggtgcttgctggagcatatacagtgagcaaagcaggaagaagctagggagaaaccgtggcctgagggaaagggacagagagggagaggtgaactccaacttatgatctggtctggggaatatgggggttccagtcccaagtcctaaggaaggggccaatacatggatgtgagggaggggcaagagctagagttggggcttatgtacaggggagcttacagtggggtacattcagtcccctcactgcctgggatccaggaatatggggcaaggactgatgctcaccactggagggttggggagaggatatcggtctgtagccactgaagctatcactaggatggggttttgggggaagggtgtggggggtaccgtgcagctggaagcccctgagttagggttccctgggcagaggggctgacattcccaggttagggaggtgaggtcattgtttgcagcccagggcctgggctagggcacagaggaggtactaggatgtagattccagatctggggaacccaggatgaggtgtgacttttaggggcctgagggcagtgcttacagctgaagggcagctttgggcttggaccgggtcctggggggatgagggggtggggttctaagtctaggagcactcttcacaaccgagaatgccccggggctaggattccgtatctgcgggtccgatgggagctccgtttgtcgcccagggagctcatggtaatttcttgatctggggagtgtctctgcagccaggaaaccccggggccaaggttctggcttgggttcggaagggacactggggtggggtccccgaacttgctatttgcaagttagacacccgggctggagttccgcatctgggcccgaggttgggactccagtctggggtcgctgtccgcagccggggctggtgaccgcaggcctggaggggggcccagaggtcttacctggcgagtagagcgcagccagctcgcgggccccggcgtgctgcgcgccccagcggcaacaagacgcctcgtcctcgtccagctccagctgctggcccggccagttctcggcgcccgccatggccactcgcccgatcggcccggtgcgctctgctggcggcggcggcggcagggccgcggaaccgcggcgagatcacgccgcccaatgaccgcccagcgccgggcgcggcggcggcgcgggcggggtcctcgcccggccgcgcgtcacagccaatcggggctcgcgccggagccgcgcaggccaatcggacgtcgctgagccgcagccaaccgccgcgagccggaggctgggacgcagctggacgcagctgggcgcggaagcttggggcggaggcgcgtgcccgccttcccagctcagccccggcagggctcccggctccagcccactgggagctcgcggcgcgtcgccgcccagctaggcttcggttcacgggcccatgcaatgggccgaggcagggcccagaaatgggcatttcttgagccggcagcgttaagcgcccactgtgtgcaaggaacgcgagggcagggcgccgggctggggccgaggccaggaagcatttggcgggtgctctgtacgatgctccctagcgaggccgatggagagtgggctggtttatcaagccctactgtgtgcagaggtttcgggtgccatgtgttcatcagctgtgtgccagctctgtgctgtgcgcccaaagaggagaaacgtcgagcctgccccgcatcctccccagctcatgttctcccggtggcgaggacagtaaactaatgaaaatgacaactagggtcactatgagatttgctgagcgcttaatatctgtcaggtgctggaccaagagctagacgagcaacatttatttgactcttaaacaccaatggtattgcctcctcagagagccccaccaccaccaccctgctcaaaggtgccccctcctccagtcactgtgacatcaccctgttttgtcttcacagcgcttctggtggggattgagcttgcagtccctgtctctcctatcagagagcaagctcctgagggcagagaacagctttgtttacagcagggcccccgtgccaggatcggggctggaacatggtagaagctcaataaatgcttgatgaatgaattaaggctcagccagatgcgtctaatacttcggcagataaatgacagcagcagggatttaccccaggtctaaccgacaacaaagtatgcaataatttctcatagaaattccatacaggcagccgggcgcggtggctcacgccggtaatcccagcactttgggaggccaaggcgggcggatcatgaggtcaggagatcgagaccatcctggctaacacggtgaaaccccgtctctactaaaaatacaaaaaattagctgggcgcggtggcgggcgcctgtagtcccagctactcgggaggctgagacaggagaatggcgtgaacccgggaggcggagcttgcagtgagccgagatcgcgccactgcactccagcctgggcgacagagggagactccgtctcaaaaaaaaaaaaaaaaaattccatacaggctggacgcggtggctcaggcctgtaatcccagcactttgggaggccgaggccagtggatcacctaaggccaggagtttgagaccagcctggacaacatggtaaaaccttgtctctactaaaaatacaaaaattaggcaagctacttatcccagatacttggaaggctgaggcaggagaatcacttgaacctgggaggtggaggttgcagtgagccgagatggcgccactgcactccaacctgggtgacaagagtgagacttggtctcaaaaaaaaaaaaaatccatacagtgagatcacataggagcctccctagaggctgtggaaggtcctgaaaggtgctgggggagcagagagggaaggtaagatccccttccagaatccaggttctctgagggtttaagtcctggattcctgcactaccagtcaccccagggctgtttcctgagtgttcctaccatagacagccactgtccccacccaggcctatgctccctccgtttctttcccacacctgctcccaggaaggaaaagccaccttccagtggcagggatgggttgcaacccaagtcctggtgaattccggtgaagctggctggttttgcatcagtattaacagcacagttaatccaacagttggattttttaacccaggagcttaaggcttgggtggggggcggcggacgggggggggggggcgcggttggtggctttggtgggggctggatgtcagatttcaggtaaataccttctaaagctctctgctcgtatcccacagcctccaaacagggtagggtggctggttactgctgctgtccagagaccctcacagtggccagcaccagatggttgatggacagactgcctgagataactcattccttcattcattcactgaacatgtttattaaacaccaacctgtcccagggaaacagcagggaatgtgacagaatccctgctttcttgggaggtgggggtgaaggttagggaagtcctgtttaagaaggtgacattggatccaagacctaaaggatatgggggagacagttacttaaaatgagctgggaagtcccttccctgtggggttttgagtagaggaatgacatgatctgacttttttttttttttttttttttttttgagacggagtctcgctctgtcgcccaggccggactgcggactgcagtggcgcaatctcggctcactgcaagctccgcttcccgggttcacgccattctcctgcctcagcctcccgagtagctgggactacaggcgcccgccaccgcgcccggctaattttttgtatttttagtagagacggggtttcaccttgttagccaggatggtctcgatctcctgacctcatgatccacccgcctcggcctcccaaagtgctgggattacaggcgtgagccaccgcgcccggccgacttttttttttttttgagacggagtctcactctgtcgccaggctggagtgcagtggcacaatctcgtctcactgcaacctctgccccccgggttcaagcgatcctcctgcctcagcatcctgagtagctgggactacaggcacgcgccaccacacccagctaatttttgtatttttagtagagaccgggtttcaccgtgttggccaggatggtctcggtctcttgacctcgtgatctgcccacctcagccttccaaagtgctgggattacaggcgtgagccaccccacccgccttttttttttttttttttttttgagacagggtctcactctgtcacctgggctggagtgcagcagtggcacaatcttggctcactgcagccttgacttcccaggcttaagggattctcccacctcagtctcccaagtagctgggactacaggtgctcgccaccatgcctggctaacttttgtattgttggtagagatggggttttgccatgttgcccaggctggtctcaaactcctgggctaaagccatcctcccacctcagcttcccaaagtgctgggattataggcatgagccactgtgcccagcctatatcttttgtttcatgagatataaatctttttttttttttttttgagacagagtctcgctctgtcacccaggctggagtgcagtggcgtgatctcggctcactgcaaactttgccttccggtttcaagcgattctcctgcctcagcctcctgagtagctgaaattacaggcgcccacaatccctggctgatttttgtatttttagtagagatggggtttcaccatgttggccaggctggtctcgaactcctgacctcgtgatccgtccgtgttggcctcccaaagtgctgagattacaggcatgagccaccatgccccaccaagagatataaatttcataccttttaaagtataaagtgaaccatattaaattccgtggtttttagtatattcacacagttgtgtaatcatcacgactatctagttccagaacattttaagtacccccaaaagaaaccccatatccattagcagttactccctcacttccctctttccccagcccctggtaaccattaatctactttctgcttctaaggacttgcttctactggacatttcaatataatggaatcatataatctataattatatgaagccttttttgtctggcttctttcacttagcataatgttttcaaggttcatccatgttgtagcacatgtcagaactgcacttttttattcttccagtagctcagattacaggcatgcgccatcacgcccagctaatttttttgtatttagtagagacggggtttcaccatgttagtcaggctgattgtgaactcctgacctcaggtgatacacctgcctcggcctcccaaagtgctgggattacaggcatgcgccaccgcgcccggccacgtatatcttttttggagaaatatctattaaaatcctttgccttggccggatgtggtggctcatgcctgtaatcccagctacttgggagactgaggcaggagaatcatttgatcctgggaggcgagtgatccgagtgagctgagaccacgccattgcactctagcctgggcagcaagagcgaaactccatatcaaaaacaaacaaacaaaaaatcaaatcctttgccttttttcaaattcagttattggtatttttcttgaattgtaagagttcttgatatagtatggctattaatcccttatcatatataggatttacgacaattttctctcattctgttggttgtcttttaacttccttgataatgttctttgacatacactttttttttttttttttaaatagggtctcattcttttgtccaggctggagtgcagtggtgtgatcatggctcactgcagccttgaactcttgggttcaggtgattctcccacctcagtcatccaagtagctgggattacaggcagattacaggcatgggccaccacactcagttaattttttgtattttttttttttgagtggagtcttactctgttgccctggctggagcgcagtggtgtgatcccagctcactacaacctccgcctcttgggttcaagcgattctcctgcctcagcctctcaaatagctgggattacagatgtgctccaccacaccagctaattttttatatttttagtagagatgaggtttcaccatgttggtcaggctagtctcgaactcctgacctcatgtgatccaaccaccttggcctcccaaagtgctgggattacaggcgtgagccacggcacccagcccagacttccctttttaaaaaaattttttcttcctcacagggtctctgtatttgtctccctggctggaatgcagtggcaccatcatggctcactgtagcctcaacctcttaggctcaaacaatcctcctacctcagcctcccaagtagcttggatcacaggcacacaccaccatgcctggctaatttattttttgtagagatggggtctcactatgttgcccaggctggtcttgaactcctgggctcaagcaaacctcctacttcagcctcccaaagtgctgggattacaggcgtgagccactgcgcttggcctccgagtggtacatttgttaattgataaacctatattgacactccattatcacccaaagtcaatagctggcattacgattcactcttggtgtacattctgtgggcttgggcaaatgtgtaatgacatggatccaccatcatagttatcagacagagtagtttcactgccctaaaaatcctctattgcagatgtattttaatgatttggctgaatatgtgggctgctaagaagtgggctttgagcccacaggaatttaaaaaaaacccaggccatagcctggcagaaggaccagggggcctcagagagtataccaggctgtgagaagagcctcagaggcaagcagggatggccatgtggtcaggatgtcgggggctcctgagaggctgtgtgtgcccagcagagccacctgttccctgatccagtcactgagcacatctcctcacccccagcagggcttcctacccagcagaaagtgccccaggcagtgctctggccctgttgcgggctttaggccaacaccctcagtgtgtccacctcctgacaagggacaagagtgtggacaggaaggcttccttccctgggggtggggggtgtcctggagggactgatcagaaccagatgttgcctgtctggactgtggcacagctgtccccaaacttcctcttttccacaaaaggttcttttcgaaacatgtgagacatgggcatgtggatatctgttcctggctgccgacatccattcctgctccttcatagaaataataccctgaattggctgggtacggtggctcacgcctgtaatcccagcactttgggaggccaaggcaggcggatcatgaggtcaggacatcgagaccatgctggctaacatggtgaaaccccgtccctactaaaaatacaaaaaaagtagccgggtgtggtggcacgtgcctgtagtcccagctactcgggaggctggggcaggagaatcgctgaacccgggaggtgtaggttgcagtgagccaagatcacactccagcctgggtgacagagtgagactccatctcaaaaaagaaaaaaaaaaatgccctgaagttttggaggaatctctcttgctgcccctgttctcagcccctgaatttagcacaagccaagctacattgtccagtcccctgggatgcagtgattggttcagggatgagcatgtgacttcagatggtctatgacagtggacttcaggatcctggtatggaattgggatgtgaataagaaagcaagtctcatcagaatctgctggcagccatgggggcatcatcctcagggtgagtgcaacattagaggaagcaaaaaggagagaccaagagaaaccaggtccttgctgagacctttaagtgcctggatcaagcttcacctgaaagcagccctacctttccagtcagacagacttaggttaagtctcagctccaccacttgtgtgctgtgtgaccatgggcaaattatttactctctcaggatgtcagtttcctcctgtaaaaatggggatcctagcagagtgccagcttcatagggttgttatgaagataagttaatacatacatagttgttagaagagtgcctggtatattgtaaaccctcaataaattttattttattttatttttttgagacagagtctcactctgtcatccgggctggagtgcaatggctcgatctcggctcactgcaacctccgcctctggggtacaagtgattctcctgcctcagcctctcaagtagctgggattacaggtgcctgtcaccacgcccagctaatttttgtattcttagtagagatggggttttgccatgttggccaggctggtctcaaactcctgacctcaagtgacccacctgcctcggcctcccaaagtgctgggattataggtgtgagccactacacccgccttcaataaattttagctattactgttagcactgagccactggaacaaaccttacctgaactgaaactttcctttgaacttcactgatataggaatccagtggattctgtttttgtttgtttgtttgtttgttttttgagatggagttttgctcttgttgcttaggttggagtgcaatggtgtgatctcggctcacggcaacctctgcctcctgggttcaagcgattctcctgcctcagcctcctgactagctgggattacaggcatgcaccaccacgcccagctaattttgtattttttagtagagacggggtttctccatgttgttcaggctggtcttgaactcctgacctcaggtgatccacctgccttggcctcccaaagtgctaggattacaggcatgagccaccgtgcctggcctggattctgtttttattttgctatattttttcttgcttgcagagtgtggggcctgagatcagggaaggatcagcgagaaaggtgtggggaactgtgtttgaaggtggctattgctctgtggcaggcagtttgcatacaacttgctatttggccccattttccagaaaaggaaactgaggttcagagaagttaagttgtccaatgtttcgtttttttttttttttttttttgagatggagtcttgctctgccacccaggctggaacgcagtggcgtgatcttggctcactgcaacctccgcctctggggttcatgccattctcttgcctcagcctcccaagtagctgggacgacaggcgcccaccaccacacccggctaatttttttgtatgtttagtagggacggggtttcaccgtgttagccatgatggtctcaatctcctgacctcgtgatccgcccgcctcggcctcccaaggtgctgggattacaggtgtgagccactgcacctggccaacttctccagtgtttttaccaaggagaaaaggtaaggtaaggtgccgggtgtggtggctcacacctgtaatcccagcactttgggaggccgaggcgggtggattacttgaggccaggagttcgagaccagcctggctaacatgggaaaccccatctctactaaaaacacaaaaattagctgggcgtggtggcacgtgcctgtgcctgtaatctcaactactggggaggctgtggcaggagaatggcttgaacccgggaggcggaggttgcagtgagccgagatcacaccactgcactccagcctgggcgacagagcaagactccgtctcaaaaaacaaaacaaaacaaagataagggagggaagctggacactgggtatggcaagagtaaacgccaggagatgtgactgtacctggtgtgcatgcagggaatgggagtcattaggaatccagaggaattagcggggaataaaaggccaggaggccaggaagggcggagtccagctccgtatcggtggtggttgaagctatctttgtgttatggccacatcaggggttcccttgcatcaatcttcttatctgtgagggggacatagaggtgcatttgtttggattagatttgactataagccacagatatcccaaagttatagtggcttaaacatggcagacacacacacacacacacacactacacacacacacacacacacgaacatggcagacatttcttttcctttcacataggtataggggaccagaggtagtgtggcagaatccacaatcaccaggccccttctatctggtcactccaccatctggtcggtcaaccaacaggtggcttccacctcagggcccaagaaggttgctcatgctgcagccgttttgtcatattccagccagcaggaaggggcaaagaaggcaacacttccctgctttgatcccactggttagaacttggtcttagtcacatggcactctctgctgtacaggaggctggagaatgcagttgtcctctgcggagaccaacttaaaagctggggttctattaataataagaaaggaaaatgatattattaatagttgatactcggaagcttctgccacacacatggcaggcacgagtccttctttttggcctccagtgtatgaactgctttcctaggctctctagccattgtggtgttcctgagagttccccaattatttccctagtagattacttgtttcttgcctgtcatcgtgagccctcatagtgaatggcataggggacaagatcagaaatgcctgatcaacaataacggtgagcatttattgagcacgtactgcacgccaggccatgttataaccttacttcagcctcccgagtagctgggattacaggcatgcgccaccacgcctggctaactttgtatttttagtagagacggggtttctccatgttggtcaggctggtctcgaactcccaacctccggtgacccgctcgcttcggcctcccaaagtgctgggattacaggcctgagagccaccgcacccggccggacctggttcattttaaaattgttgtcttaatcttagttgcttaactgcttgcaattctgtgtgttggctggtggttcctctgtgggcttcccctgggcttgtgcatgcggctgcttctggctttcagctgtgctggctgggctaaggtggcctcattcatggtgacatgggattcagatgggatccagatgggattcagatagcagctgattgttggctggggcacctctgtactgcatctgggctctcatcatccagaaggttagactggcttctgtacgtggtgttttcagcacagcatccaggagccctaggcccagatgtcccataaagtctctttctcccatttattctatctcaaagcaagtcaaacaccagcccagggcttccaggaaactgctcctcgctccttgttggcccacagacttcatttgtactcactagcagagggataagattactctttgactcatccggccctccaaggcagggcagggaatggggtcacttacctaaggcacctgggttgcctggggaagggggcaagtgcagggagagggtggttacagagggacacaatagacaataggaccatcaccacccactgtttatgttcggtggaatttctttccaggcattttacaaatatacgcaagagatcttcctgcctgccacacttatactgagaacctttttctggaagcctcttgggactgtgccctaattgtgtctagatccagggcacaatcatacaatgatgtttttccttttcctgggagcaggtgggaatgacagattaaaacttgctttaaaaactagaacaaaacataggtgagtttctaaaaaaatgcctttaaaaataataattcaattttttttcaaatttacagaaagttgcaagaatagtacaataaactctcaataccctaattatcaacattttgctacacgtgatttatccttctttctctccatgtgtaccattttttcggaaccatttgagagtcagttacagacataatgcctttttaccctaaattcttcagtgtgtatttcttaagaacaaagacattatcttataggaactctatagtttttaaaatcagaaaatgtcacattggtgcaatgctataatttaacttcttttctttcttttctttttttttttttttttttgagatggagtttcgctcttgttgcccaggctggagtgcaatggcgtgatcttggctcaccgctacctccgcctcccaggttaaagcaattctcctgcctcagcctcccgagtagctgggactacaggcacacgccaccacacccagttaatttttgtattttttttttttagtagagatggggttcaccatgttggccaggatggtctcgatctcctgacctcgtcatctgtctgcctcggcctcccaaagcagtgggattacaggtgtgagtcactgcgcctggcctataatttaatttctatcgttcagattcaaatctcgttatttatcccaattaggaactgagacccttttttttttctctgagtctgcttgcaagggacatctcttattcttaaactagtgactatcaatgtcattgcaccccttctagggaggtaaaatgtccttctgcccaaagagaagaaagtcaataacacataaaacctgtttaaagaatctgtgcttagaaatcctcctcgtaggccaggcgcggtggctcatgcctgtaatcccagcactttgggaggccgaggcaggtggatcacctgaggtcaggagttcaagactagcctgggcaacatggtgaaaccccgtctttactaaaaatacaaaaattggctgggcgcggtggcgcatgcctataatcctggctactcgggaggctgaggcaggagaatcacttgagcacaggaggcagaggttgcagagagctgagactgcgccactgcactccagcttgcgcgacacagcgagactctgtctaaaaaaaaaaagaaaagaaaaagaaatcctcctcatcctcataggctctgtacagttacagcaatggttctcagttgggggtgattttgactcccaggggacatttggcaatgtctggagaaatttttggttgtcacaactggaggtggtgatttactggcatctattgggtagaagccacggatgctgctaaacatcctacagaggacggttcccccgctgcctgacaacaaagaatgacccagtccaggatgtcaatggggccaaggttagaaatcctgacctgtaagtaaactgaagaggcatgcctttttctgttgcaatggagctcccgtggatctacaattcaccccagcaattccatttccccccacctatgtcacaaaatcccacctctgtaggcacagggaggtccagccaagtgtgtttaggatcgctggaaactggaaccaacctgcatgcccgttaggaggagacagatcaagcacgtagtcacgctgcgctgtgttgcttccctccgcttcttttgctcctgggtaaatagggcgggggaggtgagattggaaggatgccaggaatcttgggcccagctgctgctttatgacttagggatataactgcttctgactcatgcgtgcttggctctttgtgattatgtgctgagacacgtcagcgggaggctgccccggaatgtctccccatgcgaatcgagggtggggcctctgctgagtcacctctggctcctagaagcctggctcagggtcagctcatttgaaaagcggctgccttttcttcttttctcttctcttctctttttttttctctctctctttcattcacattatagcttgagtcagaacttcattcctttttaaggctgaaggaccacattttgcttgtttgttcatgtgatcgatgatgatggacacttaggttgtttccactttttagctatcgtaaacactgttgctaatggaatatgggtgtacaaatatttcttcaagatcttgctttcaattcttttgggtatatacccagaagtggaactgctgcatcatatggtaatttctgtgtttaatttgttgaagaactgccatactgttttccaggttggctgttccatttttaaattttatttatttatttattgtttatttgtttatttttttgagacggagttttgctcttgttgtccaggctggagtgcagtggcgtgatcttggcttattgcaacctccgcctcccaggttcaagccattctcctgcctcaggtacccaagtagctgggattacaggtgtgcgccaccatgcccagctaatttttgtattctagtagagacaaggtttcaccatgttggccaggctgatcttgaactcttgacctcaagtgatccacctgcctcagcctcccaaagtgctaggattataggcgtgagcctccacgtccggcctggctgttccattttatattccaacagtgcacaagggttccaatttctctacatcatcaccaacacttattattattattattattttggagatggagttttgctttgtcacccaggctggagtgcggtggcgctatctcagttcactgcaacctccgcctcccaggttcaagcaaatctcctgcctcagcctcccgagtagctgggactacaggtgagtgccaccacgcccggctgattttttgtatttttagcagaggtggggtttcaccttgttggccaggctggtcttgaactcctgacctcaggtgatctgcccaccttggcctcccaaagtgatgggattacaggcaggagccaccaagcctggcctgttttgtagttttcattgtacaagtttttcactttttggattaattcctaaggattttcttctttttgatattattgtaaatgaaattgtttttataatttttgtttcagatcactcactgtcagtgtagagaaaagtaactgatttttgtgtgctgactttgtatcttgctactttgctgcattcatttattaattctaacagttttttcttagtttgtgaaatctttagggtttctacatataagatcatatcattggagagcagagattattttacttcttcctttccgtttggatgcctttgatttctttttctttttttttttgagatggagtctcactctttcgcccaggctggagtgcagtggctcgatctcggctcactgcaagctccacctcccgggttcacgccattctcctgcctcagcctctcgagtagctgggactacaggcacccgccaccgcgcccagctaatttttctgtatttttagtagagacggggtttcaccgtattagccaggatggtctcgatctcctgacctcgtgatccacccgcgtcggcctcccaaagtgctgggattacaggcgtgagccactgcgcctggcctgatttctttttcattcctaattgctctggctagaactaccagtactatgttgactagaagtcaacatagggtttttttttttttgagacagggtctcactctgtcacccaggctggagtgcagtggtgcgatctcagctcactgcaacctccacctcccgggttcaagcgatccacccagcctcccaagtagctgggacaacaggcacctgccgccacgcttggttaatttttttttgtagagatgaggtttcaccatgttgcccaggctggtcttgaactcttgagctcaagtggtccgcccaccttggactcccaaagtgctgggattacaggcatgtgccactgtgtccagccttgggcagccattttggaccataagatgaaaactgccagttgtcttcaacaaaaagagcgcaagatagcaaaagactgggttcctgacaccgtaaagcaactatgcagctctggatcactttcattcagattaatatgagagaggaaaacaaactactttttgactaggaggcagttgttatttgaacctttcttacagcatggagcctgtatcccaccattgtagtttgtctaatgaataaatggatgattgaataaccaaagaagcagtcagatccaggcccccatacagattcatgcacaaagactctgccttagcctaggtgggagcaacgtccaggtgcagtagaaatattcatggctggaggctagttctttctgacacagggtctcgctctgttgcccaggctggagtgcagtggtgtgatcacggctcactgctgccttgacctcttgggctccagcagtcctctcacctcagcctcctgagtagctggaactacagatgtgtgccaccacagctggagatatatatatgtattttttatagagacatggtctcactatgttgcccaggctgatctcaaactccaggattcaagtgatctgcccaccttggtctccaaaagtgctaggactgcaggtgtgtaccaccgtgcctggctgattttttttctgtattttttttaacgacaaggtctcactctaccaggctggtctcgaactctttggctcaagtgatttgcccaccttggccttccaaagtgctgggattacaggtgtaagccaccgcgcctggcccagaggagctagtactactagttctaaatctggcctttccactagctagctgtgtgcccctgagccacccatgtgccctctctgggtctcacatttctcagttgtaaacccggcttagcaaatctttaaatctatgcaatttaaagttatttttgctcttttgcaattgcatttctaggaatccattcccagggaaattctcaccacatagcacatgaacacaggtgccaggatgcagctgcaccttcctttgtggagcaaaaacttggaaatatccttaaaagtgattaagtaaatcagagtatgaactgtgctctggagtgcaagaccgcggactatggctttctggattctctggtgacacctgctggcacaaagggatactgcagcccagcttggttacgtattgggaatttctagaagaagagaggttcggggcaattgtgtgagggtggtttgggaaggcacagagcagggagagatttggaaggaaggtcaaggcaaggaggtggcctgggtgtggaggttgcaagcatagacttgggttcaaattccagcttcactacttactagctgggtgagcctgggtggatttgggactttctctgagcctcactttcttcttctgtaaaataaggattctgggccaggtgcggtggctcatgcctttaatcccagaactttgggaggctgaggcgggcagatcacaaggtcaagagttcgagaccagcctggccaacatggtgaaaccccatctctactaagaatacaaaaattagctgggtgtggtggcgtgtgcctgtaatcccagctactcgggaggctgaggcaagagaatcacttgaacctgggaggcagaggttgcagtgagctgagatcacgccactgcactccagcctgggagacagagcaagactctgtctcaaaaaaaataaaataaaataaggatcctaaggcccgtgttacagattattggtgagggctgggtgaaagaactaatttatttaataatttattgaaacaacatttcaataaagatgtcagtgactgacaatctcatctaggtgccagggatacagcaggggatgaggcctgggtcctgccctcctggagcttacagtctagtgcagagaacacaacaaaccaataagcatgcatgtgatataatctcaggtattatttttatttatttatttatttttgagacagagtctcagtttgtcacccaggttggagtgcactggtgccatctcagtcactgcagcctccacctcctgggttccagtgattctcatgccttggcctgccaagtagctgggactacaggtacacaccaccatgtcggctaacttttgtattttagtagtcggctaatttttgtattttagtagagatggggtttttccatgtcgcccaggctagtctcgaactcctggcctcaagtaatttacccacctcggcctcccagtggcgggattacaggcgtgaaccaccgtatccagcctaatttcaggtatttatgacactacaaacgaaaataaagcaggaggcgtgctggtgtgggtggaggcattgttacaagtggggtgtgtgaggagggcatctctgaggaggcttgagcagagccagaggagccgtgtcgtgtgtgtgtatggaatgcatgagaaatgctagtggaagagcctcacacataggaaagggccaataaatggtgggtcatcatcttattacacacagcagagggaacgaaaggaagagggattggaatccgtttcccagggtctgcggcagtcacagagagtgacagaagattccctgggctggcaggtggagcagcagccctgctcatggtgtggggggtggggagccctggacctgaggagacccagctctgggtggccttgggtgagccactctctgggcctcagtttcctcatttggaaaacagggccgataatgcccaccttgtgaaactggggggtgtcacaggctgaatgatgacctcctccaaataattatgttgagattctaacccccagtacctcagaatgttactgtatttggaaataaggcctttaaaggggtaattaagtggccaggcacagcggctcacgcctgtaatcccagcactttgggaggtggaggtgggcagattacttgaggtcaggaattcgagaccagcctggccaacatggtgaaaccctatctctaggaaaaatacaaaaattagctgggcatggtggtgaacatctgtaatcctagctacccggcaggctgaggcaggagaattgctggaagccgggaggcgggagttgcagtgagccgagatcccgccactgcactccagcctgggtcacagagtgaagctccctcttgaaaaaaaaaaaaaggtaattaagtaaaaatgaggtcattagggtggaccctaatccaatataatcgttgtcttcataggaagaggaaatgtggacacagacacaaacagagggagggccatgtgagcccagagcaagaaggcggccatctacaagccccggagcgaggctgcgggagaagccagccccgctcacaccttgacaacaatctctgttgattaaaccacacagtctgcagtcctctattacggtgagccctgccagctgagatggggttgacgtgggaatacagctgggcacacaggaggccctcagtggaggctggtttctttggcccagtgccacatggagcccgtccactggctgagctgggggcctgattgtggccactcaacgtctctgtaaagctcagggtctgccttgagatcctgcacttaccacggagtggccctgccttggggacccatctcacctcacttctgccctcctttctggttcatgactcagccatccactaacctcccgtggtagcactgtggccactctgtaaacgacagcaccactggtgtctcattgggggccagtctggaagagggagaccaccctaggcatttcagacagaagggatggaatacaggcattgcttacacagaggacggacgagccgagatgcagaaaggccaggtgaagcattggccacagctggaggcgctccaccctaggccagcgggacagaaggaagctgggtccgagaagccagggcttggagccacagtgggggctgcctggtaggagttgaccagggagggagggtctgtcgggcgggggcgggggctctttgccttccgatccaagctccgccctctgcagctctgctctgtgtatcccagagctgaccctgcggcgcctttcccaggctcgcgtccggtgagttcctattggccaacgggaggccccggtcggggagcgccccgggacaggcccctgtgcctcccgctttgcggagtgacgcaggccctgggctacagcaaccttaccagcccctccagcttagaggtggcagtggctctctgcggctgcgatttctttctcggagcgtcctccccatcccgttcggcctctgcctccaccgtcgtctctgtaacccgttccctgtgggagagtctctgttgcggtgttcaggggtttcggttttctggctgaacagtgattaacgcgagggaaggcgctgacggcaaggtggcaggtgaccagcccagcaggccgcccagcccttcccttcctacagacagaagcactgaggcctgcagaggggacaggcaggtgggcgtgggggatcgggggcagccctggagtcagacaggccttgttttgtcccaggaagaacattccaacacagaccacaacacctatggacctggaaaacattgtgctcagtgaaagaagccagacacagaaggacaatgttgtatgaggtacctgggatgggcagattctgagagatggaaaatagaatagagattacctggagagaggggggaattgttgaatgaggacagagtttgtgttggggatgatggaaaagttttggatacagagagttatgacgagtatacagcattgtgaattttttttcttttctttgttttttgtgacaaggtcttattctgttgcccaggctggactgcagtggtgcaatcctagctcactgcagcttcgacctcccgtgctcaagtgattttcccacctcagcctcccgagtagctgggactacaggtgcgtgccaccacgcctggctgatttttcttgtatttttttgtagagatgggggtatcgctatgttgcccaggctggtcttgaacacttgggctcaagtaattctcccgccttggcctcccaaagtgctgggattacaggtgtgagccactgtgcctagtgtgaatgcatttaatgccactgaattgtacacttaataatggtgaaaaatataaatattctgttaaatattttaccacaataaaaaaatgtgtgacagttgtcagaatcaaaatggtgtcactaatgtttttttttttttttttttttttttttttgagatggagtctcgctctgttgcccaggagggagtgcagtggtgcgatctcggctcactgcaagctccgcctcccagcttcacaccattctcctgcctcagcctcttggagtagctgggactgcaggcacccgccaccacgcccagctaattttttgcatttttagtagagacggggtttcatcgtggtctcgatctcctgacctcgtaatccgccctcctcagcctcccaaagtgctgggattacaaacgtgagccaccgcgcctggcctggtgtcactaatgttaagaaaaccttcacaaatagaggcagaccatgaagagaggggtctcattcttatatgcctgataaagaaagactttaagaactacaacccttggcggggtgcagtggctcatgtttgtaatcccagcactttgggaagctgaggcaggtggaatacctggggtcatgagttcgagaccagcctggccaaaatggtgtaacactgtctctattaaaaatacaaaaaaaattagccaggcgtggtggcaggcgcctgtaatcccagctactcaggagactgagtcaggagaatcgcttgaacctgggaggtgaaggttgcagtgagcagagatagcaccactgcattccagcctgggcaacagagtgagactctgtctcaaaaaattaaaaaaaaaaaaaaaaaagaagccgggtgcggtggctcacgcctgtaatcccagcactttgggaggccaaggtggatggatcacatgaggttgagagtttgagaccagcctgaccaacatggagaaaccccgcctctactaaaaatacaaaattagccaggtgtggtggtgcatgcctgtaatcccagctactcgggaggctgagacaggagaatcgcttgaacccgggagatggaggttgcgatgagctgatagtgtcattgcactccagcccaggcaacaagagcaaaactctgtctcaaaaaagaaaatatttatttttagagacaaggtcttgctctgtcaccgaggctggagtgcagtcatagctcactggagccttgaagtcctgggctcaggcagtcctcctgcctcacctcccaagtatctgagactacaggcaggcaccactatgtccagttaatttttaaattttttcatagagatggagtctcactatgttgcacaggctggtcagtctagacaattttaaattaaatatgtaactcacattaacaggtcacattatttatttatttatttatttatttattgacacagggtctcgctctgttgtccaagctggagtacagtggcacaatttcggctcacagcaacctctgcctcccgggttcaagcgattcccctgtctccgcctcccgagtagctgggattacaggcgcccaccaccacgcccggctaatttttgtatttttagtagggacagggtttcaccatgttggccaggctggtcttgaactcctggcctcgtgatccacccgccttggcctctcaaagtgctgggattacaggcatgagccaccatgcccaaccgcagacatctttttgttttgtttttttttctttttttttttctttggagatggtgtctcgctctgttgcccaggagggagtgcagtggcatgatacctgctcactatagcctcgaactcctggattcaagcgatcctcccacctcagcctcctgagtagctgggcctacaaatgtgcaacaccacgcctggctaattaaaaaggtgacagagagaccctgtctcaaaaagcaaacaaacaaaaaacgacacatgtgcgtgtgtgtgtgtgtgtgtgtgtgtctgtggagagagagagagagaaagaaggagaatatgatacatcaaatgtagtaaaatgaaaacatttgggaaatatttgaagtatttgtaacttttctctaagtctgaaagtatttcaaaattaaaaaaaaatttaaaaggtgaatagtgccaggtgtgttggtgcacgcctgaaatcccagcactttgggaggccaaggcaggtagatcacctgaggtcaggagttcgagaccagcctggccaacatggagaaactccgtgtctactaaaaatacaaaaattagccaggcatggtggtgggcacttgtagtcccagctactcgggaggctgaggcacgagaattgcttgaatctaggaggtggaggttgcagtgagctgagattgcaccactgcactccagcctgggcgacagagcaagactctgtctcaaaaaaaaaaaaaaaaaaaaatggtgaatagtaccaagcggtggtggaagatatgggatataaaacccttgggcacagctggtgtgagtggagacgggacagcctttctgtagagcacctggtacttagtcaaattagtccccccatcccctacaacctactctcaagccaaagtcccagagacatcctcacaccagccctagagggtgcaaggaggtggcagctcaccttatctgtggtggggcaggttgggggtcacttgggtgtctaccccagggactgggcggctgagactggggactgctcatagaaaggaccgtggatgagccacagctacaaaacccttcacacaagtgttcatgccacaaagtagccacatgtgttttgcagggacacattccagcaaaaagacacaaagtgacagaatggctgcctttgagtgggggtgagaagaggtggatggcaggtaccagaagagaagggaataaatatatgaagaaatacaaccccctcgggcagtgcctggcacagcataaatgcccaggaaaaagaggcccagttgcttacgttcccggcgacagggccgggaccagcgccggcttcctggtgaaggaggccaccctttcctcttgaggggtctgagtatgcatgtcagcacccggtgggcacccagcacccagctgaccaggggccttcacctctgtgggggttaccggcctggccctgagaactggatgaaagctggaataattctttctgtaataaagcaaacgcaaccacgttcaacctttcccttcatttcagaggcttcccgcacctgatgcctcccacagcctcaggctgagtccccaggtgctccagtgggggtggcaaagctgagcactgagttggtttccatagttttcatcattaaaatgtttaaatgactaggccgagcacagtggcttctcagcattttgggaagccgaggtaggcagatcgcttgagcccatgagtttgagaccagcctgggaaacatggcaaaatcctgtctctacaaaatgcaaaaaaattagccaggtgtggtggtgtgtgcctgtagtcccagctacttgggaggctgaaatgtgaggattgcttgagcctggggaggctgagattgcagtgagccgtgattgtgccactgcactctagcctgggtgacagagtggcagaccctgtctccaaaaaaaaaaaaaaaaaaattagcctggcatggtggtgcgtgcctgtggtcccagctacttgggaggcagaggagggaagggcacctgagtctgggggtgttgaggctgcagtgagctgtgatggtgccgacgtacttgagcctgggctacagagatcttatctaaagaaaagcctaaatgaatgtgtggtgaggagcaggcttgagttattttcatgatgagctcctcaggatagattctcaaaagtggcattggtggggctctacctctgtttattcattaatctgttttatttttatatttatttatttatttcagttatttttttgagatggagtttcactctgtcacccaggctggagtgcagtggcacgatctcggttcactgcaacatccctctcccaggttcaagcaattctcctacctcagcctcacaagtaactgggattacaggcgtgcgccaccacattcagctaatttttagtagagacgcagtttcaccatgttggccaggctggtcttgaactcctgacctcaagtgatccacccgccttggcctcccaaagtgctgggattacaggtggcagtcaccatggctggcttgttttatttttaacatttaattgggtaagctgcagatacccctcaagatgtcagtgtgcatgtcaagatgtcagtgtgcacgtcattaactagagtcaaatatttgtttctctgtctgtaaagcttacatttggtgaactgcacctttaggtgtacttttgattattattattatttttttgagatggagttttgctctgtcaccaaggctgagtctagtgttgcgatctctgctcactgcaacctctgcctccagggttcaagtgattcttctgcctcagcctcctgagcagttgggattacaggcgcctgccactgcaccaggctaatttttgtatttttagtagagatggggtttcaccatgttggccaggctggtcttgagctcctgacctcaagtgattcacccgccccagcctcccaaagtgctgggattacaggggtgagccactgcgcccagccacttttgattacttttgacaaatgcatccacctgcactgcccaaactccctccaagatgttaaacatgcagtgggttgaattgtgtcccccaagaagatatgttcaagtcctaacccctgggacctgtgaatgtgaccttatttggaaataggggcttgcagatgaacccaacttaagatgagatcattctggattgtgggggctctaaatccaatgactggtgtttatataagagaaaggagagggagatttggaggtgaacacacagagggaagaaggcactggaagaaggccgttggaagattaaggcagagattggggtgaggcagctagagccaaggaacatggtggatggcgggcaagcaccatggaagaggcaaggagggattcttccccagagcctccagagggagcaggaccctggtttcaggggagaataaatttctgttgttttgggtttgtggtatcttatcatggcggccttaggaaactcacacgaaacacacaccatcaccccagcgagcacccttgtcccctcctcagttgtgctctcccccaactggcaaccaccgtgctgatattttcctcatgggtgagttctgcctgttctagagctctaaacagatgggatcacacaggaagttcttggcatctggcatctttcactcaaacaagatttcagagattgttgcagctatcagtgctggcacgcctataattaaagtccatttacttgaagaggaagtaaattttgaatttgaggaggggagtaggcagtaagctttctttttttttttttttttgagaccgagtttcactctttttgcccaggctggagtgcaatggtgcgatctcggctcaccgcaacctctgcctcccgggttcaagcgattctcctgcctcagcctcccaagtagctgggattataggcatgcaccaccacaccgggctaatttttgtatttttaatatttttgtattttgtatttttagtagagacgggggtttcaccatgttggtcaggctggtctcgaactcctgacctcaggtgatctgcccgcctgggcctcccaaaatgctgggattacaggcgtgagccaccgcgcctggcctgtaagctttctctttaaagctgggcttgaggccccctctcccgggggtctctggccctcaggaaccccagtctgaagctgtttcccagttcagaggttgcagagatcggaggcggggctcccgcgccaccttgtggccattctaggcagcgcaacccatgatgcctgtggcggggcgtgggggtggggtggggtgggttggggaaggtgggttgggcaaatgtgtattttcctggtttgggccctcaagtcactgagcacctactcagcacctgcatgattccactgtatgtgtgtgtggacagagatgaccaagattgcgcagaccctagaggggttcccaggagagggagactacacaacactaactccagtagggtggatggagtgaggcccagaggcctgaagtccagctggagcctggaggaggggagagtaacggacttgggcattcagggaacgtttccctgggcatttcgacagctggggatggaaaggaagactgttacaggcaggggaacagcacaaccaaggtgtggaagcaggaccgggcaacattctggacccaaccaatcataaggtcatacgtgtccatggcaaacattttttttttttctttttagagacaaggtcttgctccatcacccaggctggagtgcagtgacacagtcatggctcactgcagccttgacctctcgggcccaagagatcctcctgcctcaatctcctgaatgtctgggactgcagatgcgcaccaccatacctggctaattttggatttttttgtatagacgggggggtctcgctatgttgaccggcttgtcttgaactcctggcctcaagtgatcctcctgctttggcctctcaaagtgctgggattataggcgtgagccaccacgctaggccccatggtgaattgagttttttttttttttgagacagggtcttgttctgttgcccaggctggagtgcagtggctcaatcttggctcactgcagcctctgctccccttcctgggctcaagtgattctcctgcctcagcctcctgagtagctgggattacagggtcgtgccactgcgcctggctaatttttgtatttttagtagagatagggtttcaccatgttggccaggccggtcttgaactcctgacctgaaatgatccacccgcctcggcctcccaaagtgctgggattacaggcgtgagccaccgcgcctggctggcttaagtcttaagcagcagcttccacttttgtgttctgggggaggccagcagctgtgtaagaagtctgtgctggttgcaaaaagtgcaaggtttaaaaaaaaaaaaaaaaaaaaaaaagactgtgctgaggagaccacatggaaagggcaagagaggccaggaggagaggctacttgaagggacaacttgcagcatgtgcagaggccacatggggagaaagaaactgccagagggagcactgaggaatgaactaaggcagcagacacatggtccagccagccatccgccactcgggccagccgtgaggtgccacacgtggagcacagaagccactgtggacgcttggagcagagataagccgtcccctcatgctctgtcctaattcctcacctacaggatcgtgagcaaatatactggtggttattttaagcccttaaaaaacagaattactggccgggcgtggtagctcacacctgtaatcccaacactttgggcggccgaggtgggtggatcacttgaggtcaggagttcaagactagcctggcctacatggcaaaaccctgtctctactaaaaatacaaaaattttttattttgtatttttagggcgtggtggcacacacctgtaatccagctatttgggaggctaaggcatgagagctgcttgaacctgggaagtggaatttgcagtgagctgagatctgagatcatgccactgcactccagcctgggcaacaaagtgagactctgttttgaaaaaaaaaaaaaaaaaaggcattactatataatccagtaaccccaccactgggtatatatcccatggaaatgaatctagtgtgttgaagaaatatctgcgcttgcacatatcctatggaaatgaatctagtatgttgaagaaatatctgcgcttgcacggttattgcagcgttattcactaagttttgaggtgcagtgttacatggtggcagccagaacccccggccctgggctactactgttgctggtttcttatgacccttccagcatgagcctctgcatcctcaaatacatgaagctgggtgcggtggcgcacgtctgcagtcccagctactcaggaggctgaggtgggaggatcgccagacccaggaatttgtgtgctatgatctccctgtgaacagccactgcagtccagcctgggtgatacagtgagaccctgtttctaaacagataaacaaaccaaaaagaatacgtgagtacatttccactcctcccctcatttatgtggggttcgcacaccacacatccggcctgctcttggcttttattttttttccaattaatgatagatcttggagattgttctagatgtgtactgttcaatatagtagtcgctagtccaggaggtgatttaaatgtattttaaaagattaaatttttatgtattttttaaaagtagagcactcctcctgcctcagcctcccaagtagctgggactacaggcacacaccaccatgaccggctaatttttttttttttttttttaagatggagtctcactctgttgcccaggctggagtgcagtggcatgatctcggctcactgcaacctctgctgcccgggttcaagtgattctcttgcctcagcctcctgagtagctgggattataggcacctgccactgtgcctggctaatttttgtgggtttttttttttagtagagatggggtttcaccatcttggccaggctggtcttgaactcctgacctcatgatccacccgccttggcctcccaaagtgctgggattacaggtgtgagccactgcacccagccttaatttaaatttaaatacaattcaataaaattaaaaattcagttcctcaagtacactagccacatttcaggaattcaatagacacacatggctgatagctgccgtatgatacaacccagatagagaacatgtccatcattctagaaggttctcttggacagtgctggtctaagtcctctcccatggagctacctcattcttcttagtgttctttggtaatgacagccactgacgttacctcacaagcttttgctattgcaaagcatttgctgttctccatttttctttaagcaaatgtgagtgtcttggtggcataaatgccttgcatttctgggtccagtgacatttcccattttgtttttttcctttttttatattttgttttattattttttaaattatactttaagttttagggtacatgtgcacaatgtgcaggttagttacatatgtatacatgtgccatgttggtgtgctgcacccagtaactcgtcatttaacattaggtatatctccaaatgctatccctacccccttcccccaccccacaacaggccccggtgtgtgatgttccccttcctgtgtccatgtgttctcattgttcaatttccacctatgagtgagaatatgccgtgtttggttttttttgtccttgcgatagtttgctgagaatgatggtttccagcttcatccatgtcactacaaaggacatgaactctcattttttatggctgcgacatttcccattttgatgggcatggccagattagaactggaggttacgccacttcgcacaaagactgaagctgtaagagtgcctgtttttccacaccatcaacactgcgtgtcattcacattttaaaaacgttttagctaatggcaaaggttttcaagacaaacgtgactttaccaggcccctgccctgcctgttgcctctcaagtcacaatgccagtggacatctttctctgtccacaggtgaagatccatcttttgtttgtttgttagaaatgagaggccgggcgtggtggctcatgcctgtaatcccagcactttgggaggccgaggcgggtggatcaggaggtcaggagatcgagaccacggtgaaactccgtctctactaaaaatacaaaaaattagctgggcgcagtggcgggcgcctgtagtcccagctacttgggaggctgaggcagaatggcgtgaaccaggaaggcggagcttgcagtgagccgagatcgcgccactgcactccagcctgggcgacagagcgagactccgtctcaaaaaaaaaaaaaaaaaaaaaaaaaaaaagagatcttactgtattgcccaggctggtcttgaactcctgggctcaagggatcctcctgcctcggcctcccaaagtgctgggattacaggtgtgaaccactgcgcctggcccacgttggccttttttttcaaattgtaaaatacgcagaacataaaacttaccatattaaccattttaagtgcacagtttggtgccattaaggacattcacgctgttgggtaatcgtcaccaccatccatctccagaactctttccatcttcccaaagatggaactctatatccattaaacaagaacttcctcctacctcagctcctggcaaccactgttctattttctgtctttatgaatctgactactcaaggcacttcatgtaagtggtatcatgcagtatttgtccttttgtgactggcttatttcacttagcacaatatccttaaggttcatccgtgttgtagcctgtgtcagaatctccttactttttaaggctaaataacattctattgtacagacacatcacattttgtccattcgtccatcgatggacacgggtggcttccacctctttttttttttttttttttttttttaagtcggcgtcttgctctgtcacctaggctggagtgcagtggtgcgatctcagctcactgcaacctctacctcccaggttcaagcgattctcctgtctcagcctcccaagtagcagggattacaggcacccgccaccacacccagctaattgcttccaccttttggctattgtgaagaaggctgctatgaacgtgagtgtacaaatatctcttcaagatcttgctttcaattcgtttggatacacacccagaaataaaattgctgggtcatttggtaattctatttttaattttttgaggaacagccataccatttcccacagtagctacacaagcattccagtttctacacatccttcccaacgcagcagccagcctaatgggcgtaaggtggtatctcattgtgttttattccttttatttttagttgacacataattgtacatgttcatgggttacaaaatgatatttcaatacatgtatacaacgtgtaataatcaaatctgggtaattaggatatccattacctcaagcgtttatcatttctttgtgtcgggaacattcaaaatcctctcttctcattgcgttttgtttgttttttagatggagtctcactcagttgcccaggctggggtgcagtggcgtgatcttggcttgctgcaacctccacctcccaggttcaagtgattctcctgcctcagcctcccaagtagctgggactatacgcacgtaccatcacgcccagctaatttttgtatttttagtagagacggggtttcaccgtgtcggccaggctggtctccaactcttgacctcaggtgatccaccaaagtgttgcgcctcattgcagttttggtttgtatttccttaatggttagtgatgttgagtatcttatcatgtgattattagccattcacagttttctctggagaaatgtttattcaagtcctttgcccatttttaattgagttgtttttattgctgttgagttgtaacagttctttatgtattctggatatgaaccccttatcagatatatgatttgcaaatattttctcccattccatgtttccatgttccatttttttttttttggaggcagagtcttgctttgtcacccaggttggagtgcagaggcacaatttcggctcactgcaacctccgcctcccgggttcaagtgattctcatgtctcagcctcctgaatagctgggattacagatgcacgccaccatgcctggccatttttttttttttaatttttagtagagatggggtttcaccatgttggccaggctggtctcagactcctgacctcaagtaatccacccacctcggcctcccaaagtgctaggattgcaggcatgagccgctgtgcctggccagcccccactatttctatgacacaaattcctgctactctccgtcatcaccacaactacgtgctcctacctcagggcctttgcacttgctgttccctttgtgtggtccaaggtcccccagatacctgcttcaccacattcaggtttttgcttaaatgtcacctcagtgaggtcttccctgactactctaacataaagttaaaatcaactcccccagcttgggcaatataatgagacctgatctctacaaaacattaaaaaatcagctgggtgtggtggcatgcccctgtggtcccagctacttgggaggttgaggtgggaggatcacctgagcccaagaagcagaggctgcagtgagcagagatcgtgccactgcactccagcagtgagaccctgtctcaaaaaacaaacaaacaaaaaaccccagaaaacaaaaaatcaaatctcccagaactcctgctctgctcccctgctgtattttcctccatagtgctgaccagaatctaatacaatctatactttaatcattgatcttgtttagtgcttgtcttcccccaggagaatttcagctccacgagaacaggaattgcttgtcttgtccatgaatgtgtctttagggccagaattacagcatgtgccaaggaacattcgataaatgtgaaggttgagcactgttttctgttcgttggacactctggttcctctcggcggcctgctgatgccctgtgtgcatctatcacatccatggcaccggcctttcctgatcccagagcaagggcgcccagcggatcttcacgcatgtgaatggctcctgcagtcccagaacctgccacctgggggcagtatatactcaggcaagtttcactaccggtcctgagcacctcccgtctccaaaatcctggatctcagaacctcggagcctggcagcccttggggatctatctctgccagccccacttggcagatggggaaactgaggcctcagagaggaggcatgatggggaaaatctcaaacattggaatcagggaatctggcttttaagtctggctcttgtacccattcacaagggtacaagggggatttggagggggaagtaggaagttctaatcctcttcgggcctcagtttccccatctgcctgctttgtggggtgaaagggacatctgattaactctaatgtgtcggggaaggccagcagtgaggggtaacagcaggcccagaatcccagatagaatattatcacctcattttatataccagggactgaggcccagaggggacaccagacacggccggagagccacagcatggaaggcacagggcagcatgaaaggccatccccctgccatccccctgccccacgcccactagagacacccccccattcatgttctgatggttcacctctccgccatattttcccacctgctggctgatttctaagcccttttgcagaacactctctgtcaaagcagccacgtggatctccccttggcaaatcgcctcagttttctcctcttgaaaatgggatagggaaaagctgcagagatggggaggaggaattgtgaaaagcagtttgggggcagaggaggacgtgtgtcccaggtaggaaagtgcctgttccctccccgcccccgcctggctcctgcccaccaccatgtggccacgtgggcccagcccacagcttcaggttttaaaagaggagctggaaatttgaattttgatgtgaaatctcctgatttttaaatgttggcaataaattcacttaaacacacacacatcaagcaaaacgctatggggtcaaattgaacacatctgtggtctcgatttggccactggctgccagtttgagatcctttccggctctaggttctgagggcaggtgactgggagaggtggcgccagggggatcctggtttcctgtgcccacacagccactcacgtactctgggcctctgggccgtggtggttcaagctcccaccatccccacttcttggggaaaggctgaacagtactggggtgggggtgggggagcagcaggcggggcctgttgagcaagagccttgtaaaaacaagggcttacgtcatcctagcttgcagcttccctgcaggacacctgggtcggcaccggggtgggacctgcgctgagaagggatgggtcatccccagcagggggtggagggtggggaagggtggcaagcatgttccaccccagaggccagagggcctagacccctgctggggctgagtctggtctttgggggctggcctgcaaggtccgagtaacaccttaacgcactgtgtgaccccaggtctacccttctctgtgcctcagttcttctatccagaagatgggactcacattgccaggcctgttatgacaaacccaagagggaaagtcagactggaaagattttattccttctcatcctttcatgtgacctggagcagacacacttagctcttctgggcctcagtttcctcatctataaagtggagataatgataagactgtggcctggcgcagcggctcacacctgtaatctcagcactttgggaggctgaggcaagagggccacttgaggccaggcgttcgagaaaagcctgagcaacagagtgagacatatccatctctacaaaacattgaaaaatatgaaaaaagaagaagaaaaaagacctgcctcctacaaattatcagtaggattaaatgagttaatacatgcaaagagcttggaatgtggttcagagaaggtggaagtttggcctaagaacacacagcaaatcctccaattagcttcagttcccccatatctccctgcatctcttcagaatccagaaagggaacgtgggcgagtgctttggttcagagaggggagccattttgcctaaggtcacacagcccagctaacgaggaacctctccttcttctcagcctcctccatttattcactcaccattcatcgagcaccttctatgtaccaggctctgttctaggcaccagggacacagtagtgaaggccgtggggacagacagcaagactggcaggcaagataattctgattataatgagaatggtgacggaaatgaagcaggggtgtgagaggagtgactgagggcctagacttcccatgggaaggtcagggagggtttcccggaggaggcagcttttgggctgagacctgaggagctgccttgggcagaggtggggtgacagtgttcttggtgcacagggaacagcaaatgcattccttcactggtaaatgttgagcgtgctgtgctcaggagtccctcgtgggccagccctccccaagtggcagcctgcagggagactgaggtagacagctaggataatggtggctggcgatagggaaggaaattcactagcaggtgggacagggagggcctctcagaagccgtggcctctagctcagccctgagtgtcccattttgcagtgaggaagggctggccgggtggccctagggaagctgccgcacccctctgggccttgatccctccccaacccagaggctgctgggaagacccagaaagccagcaggctgggccagtgttttatcccctccctccctgcctcctacccaccaagggtgcccagagatgtcatttctccagctcttgggggcggaggtcaccccagctcagcagataacaccaaaggttgagcaatgcccgcctgcccgctggggccagggctggggtcagtgggctggggatcagccccgggcaggctgggagctcctgcctaggtggcctgggctaggagtggcagagaggtgggcccagggagctgccccaatggcctaggaatgggtccgggagggcaaagggccctctaacctgagcctacccagcagaggcgggcaagtggtcagaaggccttgggcctgtgttcaagtccaggcgggccgttgtcgctttcccgtctgtgaaatggcagcagcaaaagcatcttcctggtggggtgaaaaaagttgaacctcggggtgcaggcccaccgtaagcacagggcagggacttggtaaaaacttatctttctctttccttctctttcctgcataccaccccctcccgtgaggcctcgcttaagtccctccctagcaacttcagaaacagaagtttttggcctctgggactggcaataggtcttagggctcagatgagggcatttcatttgggatgaatgggggacatgcggccatgtgaccttggtatgccacgccatgctctctctgggcctccactggcacaatccgtgggggtcccgttctctctgatgtgcagcccacaacgtaagccttaggtttgggagtctggtgggaacaatgccaccaccactgacagtagcgacacccttcatggattgcagctgggagaagtgaagtgactcacccaaggtcacacagtgtggcagggccgagcaccccccgcccctgccccatcccagggcccaggtcgggtggcgcagcgcggggcaagagaagacccgggcgtgtccaagcctcgagcaggcggcaggtgtggtgggcggggctaggggcggggctccgtggaccagggtccagccccaagcggggcgcgatcctgcccggtcgcgccgacccccggggtcctcatattgtctgtggcttaagaggggagtcgtcacaggcgtcaagtcttctttctaaagccggggacctggggaggaggtgggagtttacgggaggaagggccacggagatgggtcgcttctcctggagctagagctgcgggctggggtctccagggttcggcccggggagccgaccctggtcggccgtcggggctctgctcggccctcctgaaacctccgcctcctccagcagggggcgggccggggccgcgtctcggggggaaggcgatcaggtcgccccctcctccgattcccccgccttccaggacagcctccagcccagaggggcggtccgggggcggggtcgcaccgccccctctcgctcccaatcccggggcggccgggcgggggtgggcagggggcgtgaggccgcccctgcgtcccgggggccccccgaaaacgcgctccgggtgcccggtccctccgctgcgccctgccgccgtcctcccgggggtctcgggcggccgcggccgtgtccttcgcgtcccggcggcgcggcgggaggggccggcgtgacgcagcggttgctacgggccgcccttataaataaccgggctcaggagaaactttagcgagtcagagccgcgcacgggactgggaaggggacccacccgagggtccagccaccagccccctcactaatagcggccaccccggcagcggcggcagcagcagcagcgacgcagcggcgacagctcagagcagggaggccgcgccacctgcgggccggccggagcgggcagccccaggccccctccccgggcacccgcgttcatgcaacgcctggtggcctgggacccagcatgtctccccctgccgccgccgccgcctgcctttaaatccatggaagtggccaacttctactacgaggcggactgcttggctgctgcgtacggcggcaaggcggcccccgcggcgccccccgcggccagacccgggccgcgcccccccgccggcgagctgggcagcatcggcgaccacgagcgcgccatcgacttcagcccgtacctggagccgctgggcgcgccgcaggccccggcgcccgccacggccacggacaccttcgaggcggctccgcccgcgcccgcccccgcgcccgcctcctccgggcagcaccacgacttcctctccgacctcttctccgacgactacgggggcaagaactgcaagaagccggccgagtacggctacgtgagcctggggcgcctgggggccgccaagggcgcgctgcaccccggctgcttcgcgcccctgcacccaccgcccccgccgccgccgccgcccgccgagctcaaggcggagccgggcttcgagcccgcggactgcaagcggaaggaggaggccggggcgccgggcggcggcgcaggcatggcggcgggcttcccgtacgcgctgcgcgcttacctcggctaccaggcggtgccgagcggcagcagcgggagcctctccacgtcctcctcgtccagcccgcccggcacgccgagccccgctgacgccaaggcgcccccgaccgcctgctacgcgggggccgcgccggcgccctcgcaggtcaagagcaaggccaagaagaccgtggacaagcacagcgacgagtacaagatccggcgcgagcgcaacaacatcgccgtgcgcaagagccgcgacaaggccaagatgcgcaacctggagacgcagcacaaggtcctggagctcacggccgagaacgagcggctgcagaagaaggtggagcagctgtcgcgcgagctcagcaccctgcggaacttgttcaagcagctgcccgagcccctgctcgcctcctccggccactgctagcgcggcccccgcgcgcgtccccctgccggccggggctgagactccggggagcgcccgcgcccgcgccctcgcccccgcccccggcggcgccggcaaaactttggcactggggcacttggcagcgcggggagcccgtcggtaattttaatattttattatatatatatatctatatttttgtccaaaccaaccgcacatgcagatggggctcccgcccgtggtgttatttaaagaagaaacgtctatgtgtacagatgaatgataaactctctgcttctccctctgcccctctccaggcgccggcgggcgggccggtttcgaagttgatgcaatcggtttaaacatggctgaacgcgtgtgtacacgggactgacgcaacccacgtgtaactgtcagccgggccctgagtaatcgcttaaagatgttcctacgggcttgttgctgttgatgttttgttttgttttgttttttggtctttttttgtattataaaaaataatctatttctatgagaaaagaggcgtctgtatattttgggaatcttttccgtttcaagcattaagaacacttttaataaacttttttttgagaatggttacaaagccttttgggggcagtaattggcttttgttttttatttttttactttattttggatttgtaggattttgtttttgcgtttctggtgtgtagggggttgtgtgtggggggctgctgttatttttggaggttttggtggttgggtgggggtgttgcagctggtttttctgcctcctctgctactccccctcccacacacacagggtctgcttgagatggggttccagccccgggggaaaggggagaagagtaatgggtcaggcattcaggctgactcagagcccctaggcgccgggacgggtggctgggaaccctgcttgagaagagattccggagcctctggctggtcccgagtgtcaggcttgggtttggaagggctgggaggtctgtgacccctgccctgtgtttggggactaggtaggcaggcctgtgactgtaggaggagggggttcaggtcttggtcctgctgagcccgagtcagggcagatgcttttggtcagtgtagtggggtgggttgtttaaaacacagtttgtgtatacatgtgtattttaaagaggggagcctgggtgtgtgggcgagtctgtgtttgtgtgtccctggccagcaggaggggagaggccaggccaggtggagagaggtgggggaggggttcccacactttgattacctttcctgaggatgggaggctcatcacttgctctctttgcccagacttggacactgagcccacctcacctgcctgctcaaggtggctgagcccaggcacaaacgtggggctgctagccctgattccctgggacaggctcctcttccctgcccactgatccctttgccccttccggcttctcaccgcaccccctactcccatccagccctggatggcattcctgagagttgaggatgtagatggatgtgagtggatacatgtacagcgtcccacagtgcctggcacgcaagaagtgttatataagcgcttgctcttgttattattttttgctgggaagctgctggcatttggcaccccagtctccagtgcagcgccagtgtggccagtacttgccaggggccggcatctggtaaacactggacctgccccatcccatttagacctcacaataacctttgggaaggtggggattgttatgacgcctgtttttagaggtggggagcagctttgggctgtccgatccctatgggcaagacactggttgggggttgccctgccctgaggaattcaggggcagcaggcatcgtagcctggtttgccaaggacctggggcggtctgggatctcaggagcagttgctgataccgtggttcgcgaatgggaaatgctttgcccctccttttccttttgggggcctggttgtgctttccctgtgggagcctgggatgtggggaacagacagcgacactcatcccccaccgccacaaagcggaggattcctataagctccacctccctaatgccagtgtctcctgatggtggctcgagggctatgcagattgctggacacagataacctcacttcaacctgggacctgcagcgtggccctgaccacgtcccctcccagccctgggcaactggacaactggccgggcatgccttcaaagcctcgaagtcagttcagtcccaagccccactggtctcgatggtttctgtcagtagcagcgacagcaatgtgggcttgacctcaaggatttacttgctgaaggcagaggctgaggggctggacctagggaaggagggaggtggagagggtcgaaattgaggaacaaatctcaaatccctgctccctcctttgtcaccaagagttggctggtggccactgctcacccaaatgaggtgagagggaagcagcctggccagacggtgcccctcttccgcccccgtctgccccacagcttcgcttctgtttccccagtgctgtcctggaaccagcgttgagtcagttcttcacacactcacatcttgctctcatccacagtaccccacagaaggtgctagacccatttctaaaagcacacattgaggtccacagaagtgaggtttgtgctcaaggtgggctaggtggagcaggttacaaaaccatccgactcccaagtctatggggaaagtttggggctgggagcctggtttgtaatcccagttcctgtttaaaatcccaggctcttcttggagggctccttgcctgacctcaagttcaggcactccaagccccagaactgcaaacatcagtttcacagtttggaagcaacagaaagtgaatttgaacctgaaccccttgggctgcctctaaggagggctgggagaagcagttcacaggttgagggctttgacggtggcttggtatgggagcactgtggacggagctgtgcccaaaggacttggggagatgtcatagttagggcaacaccaaccccacagttcaccaagctgcaagggtgaagggctcgcagggaggaaccagtccattccgacatccagaaacaggagggggtgggatggggtgaggcgagcccaggaggccagggacgagccttgaggaatcatgataatagcaggtgtgagacaagggcttagatgtgcaaagcaccactccaagcccttggcacagagggaggtgctgggtccttagatatgtgggagaaagccggtcatgttaaccacagacccatttagtgtgtttgaccactgaggctagctgggaggtgggagcctggaaccccaactaatgtttgctcaggacaagagagttcacaaaacaagacacattcacacctcataatcttatgcaattgtcccacggcctggtgattttagcaaggagataagtggatgtcagaaatgaacgctcgagacactgctgggtgccggttccacactgacactgtgctccttggtttaatcaactcattagccttttggaggctgcagcttttgttactagcattttgctgctgtgcaaaccagcttagagaggtgaactgacctgtcttaagtttgcacagctaagaatggcagaagctggagtgggagtgagaaggggaactgctccttctgaacacctgaagaatatttccctgcaggctgggcgaggtggctcacgcctgtaattccaacattttgggaggctgaggacggcagatcatttgaggtcaggagtttgagaccaaccccgggcaaaatggtctctactaaaaaaatacaaaaattagcctagtgtggcggtgggtgcctgtagtcccagctactcaggaggctgagacatgagtatcacttgaatcacagaggcggaggttgcagtgagccaaggtcgcaccactgcactccaacctgggcgacagagcgagcgtgcctctgtctcaaaaaaaaaaaaaaagaatattcccctgccttccaagttttgtccagacctctctgagactgttttctcccagtttctcagtcgtttttttgcccagttatatttttcatttatttgacaaacatttattgagcacccgctgtgtgctaggccccttactgggtgttggggacatgtggtggccaagatggaggtgataattttcagggagacacagatgctaagtatccagtgactggaacaagataatggcagatggagtcaagggctctgcaggaaggaaagtggggcagaggtgagtgggagcggtcctgcgaggcccctcctaggaagtggcatctgagcagagacccctgagcccagggagtcaggagtatggtgggctgcagtttactggatgctcactttgcacctgctggtgtcctgcatgccttattcttaaaatcccaatgatgtaggtgcttttttttttttttttttttttaaaggagtctcactctgtcacccaggctgtagtgcagtggcatgatcccggctcactgcaagatccgcctcctggattcaagcacttctcctgcttcagcttcccaagtagctggcattacaggcttgctccaccatgcccggctaatttttgtgtttttcataaagatggggtttcaccatgttggccaggctggtctcgaactcctgacctcaagtaatctgcccatctcagtctcccaaaatgctgggattacaggcctgagccactgcacccggccatgggtgctacttattactccccctccccagatggggaaaatgaggcacagaaaggtgaagtcaccggtccaagagctggtgagtggctgatgtgaggtttgaattctcaccttgcatttgaacctgagaggccttctctgcctgttttcccccatggccctgagcctctcctttgctgttttcctgtcctgcccttccaccccctcctgagttctttctcagcttggccaatctcctgcgtggcctgtgatggcgtcccagcagtccccgctccctgtgggatttttgatggtgcattggccggggcagggtagtgagggaggcctgggctgggcagacccaggagaggccagagtgggctggggaagccaggggctttctgggctggtggtgttagcccctcccaggtgtcttccgagacagaaaggaaagagttccattttacagagaggagacccgaggctctgagaggggacagttcctgtcccaagagcagcaaggttgggatttgaatccaggcctgcctgagccccaagctcagccacttttctgtctggttgactgctctggggaagagacacgggaagaacacaattagacacctctgaggggtaggatgcttgagcaaaagagctctgggccttgtcccttggttgcagagtgaccttggttgaggcacttagccttgctgaacctgggcttcctcacctgtgagcacggagtacagatatcacccagtgtcgagcaagcacccattgtgagcccaagatggtccctgacccccggagctgtcattgtggtagaggagacaatgtgtggctagcagattggcaagcccattgcagattgtgataaaggccctgaagaaaataaggtgggggaagtggaggagggtgattgggggggaacgcgtagggagccttccaggctgggggaacagcacacgcaagggccccgaggcagggcccagctccgtgtgaggagaagagcctggagccagcatggctggagcagaggcagcaaggggaggagtggggaagaagaggacaggggtggggcagggtgggggcacagggctcctcatgcaggggtggagtaggggaggggaggatgggggcacagggttcctcatgcaggggtggagcgggggaggggaggataggggcacagggttcctcatgcaggggtggaatgggggaggggaggatgggggcacagggttcctcatgcatgggtggagtgggggagggaaggatgggggggcacagggttcctcatgcaggggtggagtgggggagggaagaatatgggggcacagggctccgcatgcaggggtggagtgggggaggggaggatgggggcacagggttcctcatgcatgggtggaatgggggagggaaggatggggagggcacagtgttcctcatgcagggctggagtgggggaggggaggatggagaaagcggggaggggtaggccacatctttcatgcagggtgttggaggctgggcgggctgtgaggtggctttgaggatgagagagtgggtgtccctgccaggtgtggcacccagaaaggccttgacaagcctgtggagggaatgaaataggctcctgggccttcgggatgaggtaaagtgcagtcggtgaagggcacagggaggcctgcccgggcccaggagacctcgtaggcgaggagcctgtgacccagggcctggagccacggggagcagttcatcgggcaggaatgaggggagggctcaccaggaggggcgctggaggagccagggccgggagccaagagagggagagttctttgggtagccctgactgcaggggagagggcaccaacccttgtggggagagaggcaaggctggagagggaggggtcttcagggtgggattggtgagggactggggacaggcaggagacaggacctctgcgggggtgtttgctttttatttgatttcccaagtaatgcatgattgtgatgggaggatcagagactgcagagtataaataaaagaaggaaataaagagcactactcagaaataaacccattaacacttgctgtgtggccttgggcaagttacttcacctctctgtgcctccattttcttgtttattaagtggaataattaatagtacctgcctcataaggttgttgtgaagcttaagtgagataacacaacaaatttaaagcagtgccacacacagtaggtattagctgtcatcattattcatatcatcattaccattttggtgggttaggagcttagatgctagaattggaatgctggtgttctgaattcaacattttcttttttttttttcccccttgagacgaagtcttgctctgtcatccaggctggagtgcagttgcgtgatctcagctcaccgcaatatccgcctcctgggttcaagcaattctcctgcctcaacctcctaagtagctgggattacaggtgcccgccaccacacccggctaatttttgtatttttggtagagattgggtttcaccatgttgtccaggctggtctcgaactgacctcgtgatctgcccgcctcagcctcccaaagcgctgggattataggcgtgagccaccgcgcctggcccaaatccaccattttctagctctgtagtttgaggcaagtgaatgcatcttgctggacctcagttcccccatctgtaataagaagatcataaaattcctcacagtgttttgcaaagatttgacaggttaactcacacagggtaagttgttaacttccagaattttcattccatgtgtatttttcctcattgtggctaaagtggccgatccaatactcattcctctccctctttcttaccaatgagatccttctattttgggggggcaagtaccctactaagagactacagtttccagcttctcttgcagctagggatgaccagtgagattaaatagaagctgtaggtgggacttctgggaaagctctttaaagggggttgactcggctgtgaggcacattcccttttgtgttccttctctgccacctcccagcccctgcttctttctacttcctgcctggaactcagatgtgatggccagagctccaggggccatcctgaatcatgaggcaaactctgaagcatggaagccacatgctgaggatggtgaatccgaaagacaaaaggcactggggttcttgatggtggtagaacagccgcaccagtctttacctgctttgctctgggcttgtttacatgagagaaagaaatctctgcttactgaggtctctgtcgtttgggcttcctgttactggcagctgagtctatttctaactgatatatttgccagaacggaatcaacctgtgtgagctctttcacgacctgcattttttcatcatgcaccagtgcttccttgttacggacactattgcacatgagcacagaaatgcacgctttgcttaggaaaaagaatttccatcagatgtggtggaaggatttctttttattcattttaattacagaagtaatgcacaaagacctcctgtcatgaaaatatcctgcctgtcctcaagtgtctctctctcatgactctgaaatttcagtgtgcctcagcccaggcttgaaccaagcccttgaaatggacagaaatttctctgctgacctcagtgagctccgcattttgtagccctagcctgcatatgtgatccactaagggactcctccgtttggaaacagagatggtcaggtcctgctgcagctcacagagcctgttggcagctgcgctgggaccagatgccccatgccaccctgaataacccttctgacccatgctgcccgccaccacctgctccactgaggccttggcctgccagggctgggaggcacctttgccagccttcctggggccagcccagctgagatctctgggaggtgagtctggaggccagggagccgggccgggtgaacttttatttttatagctgtcatcagatccctgccctagccctggagccctggcagggacaggggtggccaaggaggaggaagactcctcagagaggctggtgggtgggagtcagcaggctgtggaggagagagaactggggtgggggtcagggcagcctggggcacctgactccagccaggcctcagtcctctcatgccacatggcaccagtcatcaagctcgcctggctgaccctcttgtggggtggtgagggacaaagggacaacagggaccctttcctgcttttattcttgcaggtcagatgcagagctaattatgctttccagttcttaggacacgattgtcatcagtccttgcaaagcctgcattgcgctttagtctattttcccgtgcatcacatttttttctctttctttcttagtgaaatatacacacacagcaatgtgcacataacacagatatacagctctgtgaattttcctggtgttgacccaccagtgtccagatcaagaagagatcattccagcacccctgaagccttttgtgtcccttctagccacccctcttccacacctaagggtaatcattattctgatttctaacagcaaacattaattttgcctgtttctatgcttttatagaaatgaaatcacacaatagatgctgtttatgtctggcttcttttattaagtattgtaactaacattcattcaagttgttgtgtgtatcagtatttatgcctttttattactgagcaaaatgacattacatggacacaccacaatggatttacccattcgatccctcatggacattcaggttgttaccagttttgagctctttagaattgggctgagatgaatatttgagggatcatgtcttttttttttttttttttttttcttgagacagacttgtgctgtctcccaggctggagtgcagtggtgcaatattggctcactgcagcctctgtctcccaggttcaagtgattctcgtgctcagcctcccgagtagctgggattacaggtgcccaccaccacacctggctaattttttgtaattttagtagagatgggcttccaccatgtttgccaggctggtctcgaactcctgacttcaggtgatccactcgccttggcctttcaaactgctgggattacaggcgtgagccaccgcacccagcgaggggacatgtcttttgatgaacatattcacatatttcacttagaagtggcttgctaagccatcagaaatctaaaaatatatgttttaattcctgttaatggtattgaaacttagctctcattctgttttttacttttttactgtgtatttttaaaaaactttttagtttgagaaacgtctcaaattggttctcttgaattatttgagaataaattgctgacctgttgccctatcaccccttaatgttttgatacatagtttctacaaaccagggcattttcctagatagctacaatataaccatcataatcaggaaattaacaggatacaccatgactgtctaccaagacccattcaggtttcaccagttgccctgataacatccagtaagggaatccagtttgggatcatactttgtgtttatttttaattttattttattttgagacagggtctcactctgtcacccaggctggagtacagtggtgtgatcatagctcactgcagccccaactacctgggctcaagcgatcctcccacttcagcctcctgagtagctagaactacaggcatgtgccaccctgcctggcaaatttttgtattttttgtagacacagggtttcactatgttgcccaggctggtctggaactcctgggctcaagcaattctcccaccctggcctcccagagtgttgggattacaggcatgagccaccgcgcccggccacatgttttgtttagttccacatctctctagttgccttgaaggtagaacagttccttagtctttccttgaccttcatgaccttgacacttttgaggatacagggcagctgttgtacagcattacagcatgtctttccctgtgggtttgtctgatgcttcattgtggtgagattcaggttctgcagctctggcagaaaaatcaaagaagcgatgttatgttcttctcctcgtcccattgctgatggtgcactctttgatgacttgattgaggagatagctgccagacttcgcatctgtagggttactttccccgctctttgtagttaatcagcatttgagaggaggcacgctgaaactgtgtgaatttcttgaatgtcatcagactttcaattattcatttatttctgtcagtatagattcatagttttctattttattcagtgggttgtggtatatcatcatcattgttaacttatttatatgcttaaattgtcccagatttggctcctgggagccacttttaactagcttctgtgtcaccatcattctttgagcattttcttactttctggcacagtgaggtactataagctcatctggtattttttctgcccccagctctggaatcagccacttctcccaggagccctggttccttttagtagagaatggaatttagaagccaaaatctcaggacaaagtgctcattgctgttggggtgtctccactgcctgactctctcagtggacagagttaaggactgtatatatgtatatatagagacacatatttacagctgtgttatttctgtatctaactattatctgtctatcatctatcatctatttagaaaaatgagtgtacactgataactgcagttcccattcagcatcacagagtttattctaattttctctttccatatttgaaactctcttttccatcagtgagaaaataggcttccattattcttaatatatttgtttatttgacccatcccctatatgtaaccagtttgctgtcactgtccccccacctctgttccatgattggtcaccctccttaccctgttcagtctctggccccacactatgccacccttcttatggatggcctcagatcaacttcaccatggcctctatacatttttcctttcaatttgaatacataatatgtgctcattgttcaaaattcaaaaggtgtgaatggatttgcaatgaaaagtctgtctccctcccactcctgcccccacattcccagatccctctcccagaggttactgaagtttccagcagctttttcttatttcaaatggtctatgtgagtgcacccaaacacacacacacacacacacgatatttatgcacactgtagcacattttttacactgacctgtgctttgcttttctcactcaacaatgtatcttggagcttgttcatatcagtactatagagctgccacattccttttaatggttgtataatattccattggatggatgtaccataattatttaaccagtctctttctgatggacatttagattgtttccagtctttttctatttcacacaatgctgcaacagacaattctatccaataggtcacattttacatgagtgcagcatatattcctggaagaataggcttgagagatgcctccaggttgctctgtgtccctctgattcattactttttatgctgatgcataacattcctctgtatgtatctgccacattttaaggaaccactgcccttgtggtggacaatgattttgcctctaagtccccacagccataaacactgttctgacaagcattgttgaatgtacctctgtcacagggcaggttgtgtggatactgaaatggagtttggagtgcaagatgtttgtgggggtcaacacctgagaaatggagggggtgcaagaaggactgggcagatgaagtcatccagcagcgatgcaggcctgcagagccctgagcagtcttgggagcaccggagaggaacttgcttgttgggtgccctgtgttgggcaaaatggccagacctttacaccctgccttggtctgtctggctttcgggctgccctgggaaggatggctggggcgagatggctctctgcagctgggacagctgttggtggctggagttcatcacctcatcatactccctgcagctggttctcccctgaaggagacctaggtggtacatctttgtgtttatcagccccctaatggtcttctcagagtgcctctggtgtatttacccaggagcgggattgcagagtcttaatgtcactaatagggccagatatccctggtctcagccaccccacaaggatcagagatctgcatttttgaggtagtgagattgtgatcatggaatgaactgaggctgactctctaaggccccctgccctatgccgggccgttcctcctcatcgtccctcgttccttcgtgatctccctatagggctcatgagttggatggatgtgagtctaaatctcagctttgtcacttagatgtttgacctggagttagtgacctcttcttcctgagcctcagtttcctcatctatgcaataggtcttgtcacatccttgacttttgtgcattgtgggtcttggtgaaaagtaagccctcagtacatgacagaccatatatcaggaacacagcatcacttctgctgtatccctgcaaatatatatcagacacggagaccgaatctaatcacgggaaacatccgagagatctgaagtgaggagcactttgggaggccaaggtgggtggatcacaaggataagagatagagacctggccaacatggtgaaaccatctctactaaaaatacaaaaattagccaggcatggtggcctgcacctatagtcccagctacttgggaggctgaggcaggagaattgcttgaacccgggaggcggaggttgcagtgagctgagcctagattgcaccacagcactccagcctggcaacagagcgagattccgtctcaaaaaaaaaaaaaaaaaaaaaaatagctggcctgcatcctcgaacatgtcaaggtcatgtgggtcaaggagagactgagaaaggaactgtttcaggccaaaagagcctatatacaactaaaggaagctacatgcgtgcgatcttgggacatgatagggtccccatcacattagggccccaggtctttgtgtttctaaggctggagctcgagctacctcaggctcaggatgggggacacttccccttaagcaatgagaaggagagaggctgacttggagagaacagggagtcagggagcttgggctggattgttattccccaagaagagttgcaactggactttcgcttcagtaatgtttaaaagaaaaatgctaatctagatagggactgccattcattcattcattcattcatttatattcctcttaacaacttgtgactttgggcatgtggcttaacttctcggttcctcagtttcctgtttacaaaataatgatggtaataatagtacctatctcacaagatgtggagaggattaatggagatgataggtgcaaagtgcttagaatactgcctggcatatagtaaatgctcaataaatatcaattatcatcacaaggaatttactccacaattcatttactgagaatgtgcaacatgccagagttagttgtcactctccacctggaactagaaccacggaaaaccttagatcccataaaaccagagcctagcaaagatgacaggatcttagtgtgtcactaccctgcccatcagtctggctgccaatgatggtttaagatcccacgccccctacaatttgagcccaaggcctcctcctgacagccatgtgaatgccccacgcctcagttccccagatgttgtgacagcctcaaacactctccaacggcactgatttgaacccttgtaaacgcagaaaaaaacaagtcttaggcggcaaaaccccatttgtgcaatgtggactcccttcctcaagtcctgggtgatgctgaagggtctgaatctgccttttctttcccgcctgttgggccctggtagaaagtagcagctgggccagggttggtggctcacgcctgtaatcccagcactttgagaggccaaggcaggtggatcactggaggtcaggagtttgagaccagactggccaacatggcaaaaccccgtctctactaaaaatacaaaaattagctgggtgtggaggcacgcacctgtaatcccagctacttgggaggctgaggcaggagaatgggttgaacccaggaggcggaggtcgcatgagccgagatcacgccactgcactccagcctgggtgacagagcaagactctgtcccaaaaaaagaaaagaaacttcaggatatccttcagctatattgtttatatttttccccactttgtcttttcccccatttgtatttttttcttttgcctgaattatttgagaggcagctgtagacatgacatcactttatccccaaaccctccaggcatgagccaccatgcccagcccatgcacactatagattaatgttaaaagcattatgctgagggaaagaagccagacacaaaagacgactttctgtgtgattcctctgatatgaagttcaagaacaggtaagatgaatctagaaggcacaaaagtggttccttctgtggggtagaggagtcattgcctgcagtgggacatgaggaagacttctgggatctgcaaaattcctatgttttaccccaggtggtagttccatgaatttatccatatataagaattcaggccaggcatagtggctcacacctgtaaccccagcactttgggaggccgaggtgggaggatcacttgagcccaggagttccagaccagcctgggcaatgtagggagacacagtctctacaaaaaataaataatattagctagatatggtggtatacacctgtagtcccagttactcaggaggctgaggtgggaggatcgcttgaacccaggaagtcaaggctgtagtgagccatggttgtggcactgcactccagcctgagtgacagagcaagaccctgtctcaacaacaacaacaacaacaacaacaacaaagaagagttcattgagctgtctgtttatgcgctttactgtacatatgttaaacgccagcatcaaagtagaaacctaaaatcaatgaactcatgctgcacattgaacataggagagtcaggtgggcagggagtagggattggggtgaaagggaataaatgaatacaactagagggcagcctgtgtgggcaatcatgataacatgttgcgaattgaggcatcagataacgtcaccctgcacacctgaggttcaaaaagaaaagccaaaaaagacccaggagctcagagggggagtgtaccttgtctgaggtcacacagctggtgggtggcagaggcaggatttgaacctgggtctgaggaaccccagagtgtgctccttacccagtgctctggcctggactctccgggctggacagctctgctgtgctcccagaggtccctagggtctggcaggggatggcgaaatgactgcttggcaaagaccattgcagctcagagctcacagctccaagtcgggaggggagtcagtggagcaaagggtggctcccatccctggagccttccctccctggcctagggtggctctgccaccctccgtccacctcccgccggcctttgccttccttcctgggccagcgtgtggactctggagccctgcagggttgggtgtgaatcccagttcttcttctttctggctctgcaacctggggtgagtggcctactttgtacctccgtttccactttcagagcctgcctatgacagcatttacttaatagcattggtgagcagagtcgaggagtcaaaagtgtgcagaactcaacaccatgccggcatgtgctaattgtccaataatggcagctgctattgctgttgttgatgttattgctccttgggagaggggagcccctgttgctctaaggccttacaaacaccaacatgtgaaaacagctggcatggaatggaaagttctagagaaaggagctttctgactgcctgaaggttatcagaaaactttctatgctggtttttgtgaaagctcttggtaagctagggtagaaccagggtggcttcatgggagtaccatctaggcaattccacagagccccttgtttggaagggcccccacttggtttacaggtctgctgttgtcatcttgaaattctctctctcttcttttttttagatagagtcttgctctgttgtccaggctggagtgcagtggtgtgatcatgactcactgcagcctcaacctcccaagctcaagtgatcctcccgcctcagcctcctgattatctgggattacatgcacatgccaccatgcccgggtaatttttatttatttttatttttattttttgagacagagtctcactctgttgcccgggctggagtgcagtggcgccatctctgctcactgcaacctctgcctcctgggctcaagcgattctcttgcctcctgaatagctgggatttcagacacccatcaccacgcctggctaattttatacatatatatatatatatatatatatatatatatatatatatatatattttttttttttttttttttttgtttttttttgagacagagtctcactctgtcaccaggctggagtgcagtggcaagatctcggctcactgcaaactccacctcccaggttctaagtgattctcctgcctcagcctcctgagtagctgggactacaggtgagtgccaccatgcccagctaatttttgtatttttagtagagacagggtttcaccgtattggccaggatggtcttgatctcttgaccttatgatccacccgccttgtcctcccaaagtgctgggattacaggcgtgagccaccatgcctggccaatttttatatctttagtatagatggggtttcaccatgttggccaggctgcgtcttgaactcctgacgtcaaataatctgcccacctcggcctcccagagtgttgggttacaggcatgagccactgtgcgcagcaatttttatttttatttatttatttattttgagacggagttttgttcttgcccaggctggagtgcaatggcacggtcttggctcactgcaacctccgcctcctgggttcaagtgattctcctgtcttagcctcccaagtagctgggattacaggcgcctgccaccacgcctggctaattttttatacttttagtagagacggggtttcaccatgttggccaggctgacctcgaactcctgacctcaggcagtccgcccgcctcagcttcccaaagctcaggggttggaggcatgagccactgcccccagccctggtaatttttaaaattttattttttgtagatattggagtagggaggagtctctctatgttgctctggttggtcttaaactcttgggctcaaacaaccctcctgccttactctcccacagtgttggtattacaagcatgagctgccgcacctggccttgaaattcttaatgatttgtgaacgagggccctgcatcttgatgtggccagtcctggctgtactgtggcatccggcatggtcacctagtactttcacctgagttgtctcctgagtgctcaggaacactctttgagggcagttgtcctcatcgttaacctcactgacctcagtttccttacctgggaaacgggaggaagtgcattgtgccaggccacagagaaacaatgggtgaaccttggtcttctggccctcagattctatcagtgggaaacttgggcaagtaagggctaggcatgcctacgtgtgtgcccctggagcacagaggaggttctcagtagctacaacttgctctttgattccctggctggcctctctttttgccctaaattttttttattaaaaaaattttttaagacacaaggagacagggcattagaggaaagagctaatacatccaacccaggtgatgggttgatgggtgcagcaaaccaccatggcacatgtttacctatgtaacaaacctgcacatcctgctcatgtaccccggaacttaataaataaataaataaataaataaagagactgagtcttgctatgttgcccaggctggagtacagtggcacaatcatagctctttgcagcctcaaacccctgggctcaagtgatcctcctgcttgatcccaaagtgctgggattataggcgtgaaccaccgtggctggctgtctttttgcctttttactaagaaattttgatttaaattgataatagtaatacaggtatccattctcttaacacatgataacatttccaatcaagctgaagtcagttctggaccatctggccagggctggctccttttcactctgtcagcgtggttttataattttggggtttgaacttccagatctttgtgtatgcatttctttcatctctgtgtgaatgtggcttttccttccttcctttctttctgttatatcttttaaaatgtgaacttttacagaagtctaagcagggtacagaagatacatttttaccacctgaacacaccagtgtgagcagcacttggataaaaaagcagaactttttttttttttttgagacagggtctcactctgtcactgtagactggagtgcagtggcgagatctcggctcaccacaacctctgtctcgcaggctcaagcgattctcctgcctcagccccctgagtagctgggattacaggtgtgcaccactactgcccggctaatttttgtatttttagtagagacagggtttcaccatgttggccaggctggtcttgaactcctaacttcagatgatccacctgccttggcctcccaaagtgctggtattacaggtgtgaactaccacacctggcctgaaacagaacaaacatttttaatcactgaaaaatgtttctgtctaggacaactgctctcctgacttctaacagattacattgttttgcctgttctacaacttcatatcaatggaatcattcagagtatttgcttttgtgtctggcttcttttgctcagttaaacttttaaagttcctctatgcagtactgtacagcttcattctcactactgtgttgtgttccactgtccactgtgtgactataccatagtccagtctactgttggtagacagttgggttatttcaaggttttggttgttgtgaataaagctgccatggacattcttctttgtgtcttttttctttttcttttttttattttattttacgagttgggatcctgctttgttgccaaggctggagtgcattggtgctatcacagctcactgcagccttgaactcctgggctcaagtgatcctctcatctcagcctcccgagtagctgggatcatggctatgagccactgcacccagctcttgtttgtgtcatttggtggatgccagctcttgtttctatcaagtttatacccgaggcatcatcactggacacatcattcacgtgtgttgagtttctgcatatttccaaacagtttccaaagcatttcgctactgctgtcctccatatttctggcccatctcgctccttttttttttttttttttttttttcagatggagtcttactctgttgctcaggctggagtgaggtggcaccatctcagctcactgcaacctccgcctcctgggttcaagcgattctcctgcctcagccttctgagtacctgggactacaggtgtgtgtcaccacacccggctaatttttttgttgttgtatttttagaagagatggggttttgccaggtatccgggctggtctcgaactcctgacttcaagtgatctgcctgcctcagcctcccaaagtgctgggattacaggcgtaagccaccatgcctggccccatcccttgattctgagtacacctggagaggtcagtctttttaatatgagctatttggccatgtgtgtagtaatatctcattgtggtttcatttgcatttccggatgatcgttctttttaatgccttggcgacctcacaccagccatctcaatgggacttgttcctgtccttccgtgatgttcttgagagccgtccacatggtgcgtttgccagtttcctcctttggaaggtggcaaggtcttcccacttgataaggacgtctcctgtgactttgcctctgccccatatttctagtccatctctttccttgactctgagacctttctgtaagcggggactccatgatgttcacacacttggtgcccggtaaataaacagctagtaaatggactgacggaagcaaaggggaagaaaaacaaaaaaaaccctcctcccccaaaccccaatttggttaattgaggggttccactggggtgatttttggtcaattggagtttgcttgtgaaaccggtaagagcatggacaatcaaccataaggtagcaacacgcactgagcccagcactttccagagaattatcacactgtggatgtcacaaggatgttgggagggtctagctggccggtgggatcagctacccctcaggcctccgatattttcctgaggttccacaaccgggaagtggctgggtaaggttcctagacccagggcctctgatcctacttgccacgatgtttccatcttgttctgtgctgtgtctgcaactcacagcctggcacacaaaagactctcaaagatgtgctccaggaatgactttgatgagcacacaccacacaccaggtgctgtgctaagcccggggatacagaagagaataaggcggccccaagccccaccttcatggcgggtccattattggggtgggggatacaggtggtccgatgatgagtgctagggaggaaaataaagaaggggagggagaggagagtgtgtgtgtgtttgtgtgtgtgcatgcaagagggagagaatcagagagagagtgcgtgagtgtgaggaagagaaggatgtttcacttaaccacagaggtcagggaatgcctggctgagggaaggtgctattgggtggggtggggcgggggagccatgaggtctctggggaaagagggaatggcatggcaagtgcaaaggctctgagatgggaccatgctgtctatgttcaagggaccgcaaggaggccagtaggggaggtgccattgtgagtgatggggagagaagtaggatgggagctgggaggtggtgtgtgtgtgtggcaggggtgggtggggttctgagcagggcggggatatgcctgacttcttcctcctagggttacagggtgggtgatgtcggccaaggggaggagagaacaaaatgaagcagttggtggaaagtatgcagcctgtggtctggtacacagtaagcactcaataagtagcagagtatgtgtgggttttggatgagtgaccgctaagctttttttttgacacagggccttgctatgtcacttaggctggagtgcagaggcacaatcatagcacattgaagcctctacctcctgggctcaagtgatcgatcctcctgccttgaccttccgaagtgctgggattacagatatgagccaccacacctggctggagtgacctgctaagttttaatgggattcctggtgggttgggtgatacctgaggggacctgcctacttgggactcgccccatggagggctcagtgacctcagatgagctggaggtggggaggtggtgggcaggcgaatgggaggaggaactggttgggggcaggcacacagtgtcccgactgggagggcaggcctttccgggctccccaccagctcccctcaatctctgtgtgtggtccacaggcaggacccccatttgggctctgtttatgtgtgattacaatctgtggtctgtctctcccataggtgctaagttccctggacaggaacccatctgttgtatgggtggctgtgtcctcagctcttagaatggcactgggcacatagcaggtgctcagtgactactggatggagggtgaagggtgggtgattttgtctacgagcagagagatgggtagacggatggatggttggatggctgggtggtgatgtgagcagcactgagatggaggagagatggatgggtgggtaggtgggtgggtggaaaattgggtgggtggatagataaatggaccagtagctgacaggagcctggaccagggtggggtagaattcagtagaaaacttctggcccaagagttagaagatgggggttcgagtccagtcttgctactgagtaataacaaggtctgtggaaacctggacttgttctattgttgctctttgcctctgcttccccattattggtttttcaacttcattattccttttattgtattggatagatccccttttattcaatccctggatgtttctgaagcctcactgcaagaacagagtgaaagggagctgcagaggagatggggggcagggcccagccctgggcagcccccgggagtcctgcaagccaggggcacagcttgaacacttagcctgactgttcaccattttgccacagcttcctcctctgagtctttcctctccagggttcctccagtgaagcctctgcttccagtggtttggagcagtcccagaaatctgcactgttaacaagcctgcctcatcgttctgaacttatttctggttaagattcaccgacaccttctaggactgctggatcctatagttcagcagcaccatgtgagtgcgtgtgtgcatgtgtgtgagcacgtttgcatgcatgtaggggacatggggtgggtggatggttgcaaggacactttctgtgtttaatgtgagattttatgtattaaaacaagactggaaacaactgcagtgttcatgagtggggccggttaagtgccatgaggccagtccgctccactccttgggggatcctgcaggcattacaaataagggaaaaggttctgataagacacgatctccaagacatccttacatgaaacagcaggtgcaaacggtgcctattgtttcaccacttgtgttaaaacatacatgcaagaagagaagtgtgggtattcgtggacaattctggaagaacacacaagaatctgagaccagggtggtccctggggagggaaactggggggctgggggtgggagggagaatgatggcattttctgaatccctgccggagtcctaggttcaaattctgcctgtgatcagcagcgtggctacccctaagccggtggtgagcactctttgagcctggtttccccgtgtgtaaatggggctgtgtttgcagtgtggggctgggctggcgtgcagggcccagacactctgctcctgttttggcttctgtttcccaggaggctcctggtcaggcctcaccttctagcagccccacttggcccagggagggtgggtccccggggagggggtggcccggtccagggtggggctgagctggaaaaaccggcaggttgggagcagtctgtgcaggcaccatcttcactccccagcctggaggctgtggggacactcactcccaccccacgcccctgggaggctgggaccagagagagagagagagagaaagagaaagagacaggtaacgagggcgatacagagaaagggagagacaagaaaggaaagagacagagggagacattcagaagcagagattcaggctgagagagacaaagattcagagtcaggaggaagggggcagtggagctcgggtgggggtgggggcaaggttgcctctggccaggtgcctgggactggacgaggcatgggggcactggggggtggggtggggatgtccatgcacccactgaccatgggacaggggtgcagggagctggagcccccccatcaggacatctcccacacctctgagctccagctgcaggtctgagtgctcctgggaatcctccggggcctctcacttcttgcccctccaggcctccctggggatgtgaacctggcagctgcctctccagggggccctcccagagcagagctgggagggtctaaagtgcagtcgagctaattagtgttaggcaccgagataatcgcagcttggaatgttccttaggaggtcctggttggggcaggcagcctgggggccatgagggtgcctgggattggcccagtaggtctgctggctcctagaaccctgagtattggagtgggagatttaggaagcctggatctttgggtcttagggcttgcagtctctcagtcctctccaggccatcctgtgtagcagccaaagtgacccactggactccattctgaccatgtccaccccagcccctgcctgaagccttcagtggctccccatggcccttaaactgaaatccacctgcctctcctcagcctaggggaggctggtgatgagctcttgatcctgcctcatcactctgacttatttctatttctggaacattccatacttggcccacctcagaacctttgcatatgctgtgtcccccagcatgccccctcatccaagagctctcaggcctcagctatacatcacctcactggggaggcccctgattcctggcttgcctggtctccctggatgcaccacgtagctcccaccccctgcttcccagggctcagcgctctctgttctcatagtggcattcctcattcaatgtctgcttcctccacccatggagtggcagctccatgagggcagactccgggtctgcttagtcaccgtggtgtcccctaggacctgacatgcagcaggtactccaccagtgagctactgaccaccaaggaagtggactggacatttcttgcagtgtggactccttctacgttatgaagggaccctactgagccctgggcttcccctgtgcccctcccactgccccagccccagccccagccccataagctcctgcgtcttgagactccaccaggtggccctggctgtgatgtcgcaaggaatcactggccagaatctggttgagattatctcctggctgggcatggcccacgtctccacgcagggctgggaccacaggccgccgcctcagggtccctaagtgtcccactgtgcctcttgtcttcagctgcagataacagcattggtccaaggtggccttgcctcagctgcaagtgcccgtgctagggacgcgctaggtggcctcagggaagtccttgtctctctctgggtctccaggtcacacagagtagggtcccaccccacatgggaaagcaaaaaactgggtagaaatggggtctctggttgggagaccttggaggaaaaataacagtgcttctcaagggggggtgaagtgagaaagtggttggtgacacatgaggggatccccacgtgtccccagctggggggcacagacagtccagggtgactgacctgccccaagttccctgaatgcctgaggtttaccagtgtcctggggcccaatgaggcaggtgtggaagtgtcctcgtagcatggtggaaagagttggcaagtgaggccttgagccgtttctagggcactgatcccatggtgcctcagtttccttcttgtgaagcaggtacaataagagtttctacttcacggggatactgtcctgagctcacagaaggcaattgatcactgccactattattgcctcctaaagtcttgtctcaccctgtctccacctctctgtgcctcctgccccacctggcctgggtgattaacccgagtgagtgcagcagcctccgactgctctcctgctcttagtctcagccctacatctattctccacatgctgccagacagagtctaagaaacacgggctggctgagcgcagtggctcatgcctgtaatcccaacacttcgggaggctgaggcaggcagatcacctgaggccaggagttcgagaccagcctggccaagatggtgaaaccccatctctattaaaactacaagaattagatgggtgtgatggcacacgcctgtaatcccagctacttgggaggctgaggcatgagaattgcttgaacccaggaggcagaggttgcagtgagccgagattgtgccactgcactccagcctgggggacagagcgagaacttatctaaacaaacaaacaaacaaaaaaacatgagctgggtcacgctcctcccctgctccacagcctccagggctcctactgccttcagaataaagattggcctccttatccagacccacaggtgctgcacagtggcggccccctcccctgatctctggccactctcactgtcacttgccctgctagagccaccttggttttctttccattgcacccagctcccacctgccacagggccttggcacactttgctttctctactggaacactttcgtttctcctcttcacctagttaatgccagatctcagatcaggtggacctctggtagcaggtgctgtggggattccccagagcctctttggtgggatctgcatgcatcttcctgctgccacacagtgttggctgctgtgggctcccagctggggccccttaaagctggagtcctgcctcgctgagcaggagctgcctcccatcccccaaacagaggtggacacagccagtgaccaatgagaccaggactcaggcctcttactttgaggtgggaggagtgtggtggtgcaattcacgttccagagctccccgggggatcaggccaagtgagactcagcggaggccatatcctggcttagctcccaccttgccctgtcctgcttctcgcacccttctcccaaaagcatgtcctcagtgaatcacgtgcatgccagtccccaagtcaggctcctcttctgggcaacctgacctaagatgccttccctgccctccctgtccccctttctggtctcttctccatggatctctccttgcagccctgactatggctgtgtttttacacttgcttggatgattatttgattgaaatctgtcccccaccccagaatgtaaggcagggatcatgttccttctgtgttcccagcgcccatcgtgggcttggcacatagtaggtgctcaatccatatttgttgaatgactgaatgaatcatagctgggtgagtcagagctgggcactatcaaggccccagtttcttcctatctcatggttctgccgtctccactcagcccagctcctcatggtgccacgatggctgccaaagctcctgccatctcttcctcatacagccaagcaggaaaggccctcacatgtcctgttaagaatgaagaaaccattcccagaagccccttggcagacttccccatctcactggccacagatgcattccatgtccagcctctgccaattgctgcaagtggggaaggggacctaatcagcatctgtgcctcgaatgtcgtgggtggagtccacccacacccactgagcggggatctggctgcctacgagcgcagacccctgaacttgggtcattttgactattcctagggctgtgggtcccccacctgtccttcctccctggggagcccttgggtggtggaggtgagaagggggcggtgctgggtgagggtttcaagcaaatgaggcggccagacaccttcacctcagtaaacatttacagagccaggaatgcagaggaggtggtgagcccagcagatgagtgtgtggggaagacaccacctaggccagaggtacagatagtgagacagggagacatgggggtgagatggagagacacagagagacaccctgaaagaactgatgtgagagacacagagggaaagagagaggctgagaaataaagaggggagagacccagagacagaggctttgccgggcaagcttttgcatcaggcctggagcaggcagaggccctcttccagtgggcgtggtgaccgcacctcgttctctttggctgaaagtcccaggcaagccccttttccagactgggccttggatcctcctgtgtcaaatggagctgtgtccacacactgggcctaacatggacctgtggcctcctgtgacccagaaacagccttgtgtggtggaagggaattgtcacccccagtggaagggggaggcagtgcccaggggcatggcgagagggtggaagggggatctggaccacggagtgcatgtttctaaagcctgtgtcctgtctgtgccccacagggccagtgtggggccaggaggggtgagggtggggcatgggggtacccttaggggtggtgctggccgccagctctgtgtgccagtgacgagtgttctggtcataagaatggctgctgggtttgaatgctccccaggtgccaggcaccaaccccaccagggtggtgctgcttaatttctatttagtttggacttcccatttacaaacgaggaaactacatctcagcgtggcagcgacttcctaacaacggggtgtaggctttggggtcggaaaggtctgggtccgagtccccgctccatccctgacaggctgggggacctaggcagtcatttcctcctcctaagcatcagtttccccatttgtaaagtggggaaataagtttaagggtgacatggggatcggatgaggtgctgccagagggttcttagcacagggccgggtacacaggaagcactggatgaacgttaaccgggccattggatacaagcttttaagtaatttaaaataattcctttaatggctctccttattttttttattttttttttaagggaaagagctgaggtccagggaggggaagggacttgcccaaagtcattggccaggtggagggtctgaggtttgaaccctgtgggccctgaggccctctataccacccacgatggctcaggcctggatggcctgtttgcgactcaatcctcatgggttgagaagatgcccatagcctggcctgatagccctctggcctgacatcagctacaaccaccagttggggcagttgcaaaatccctcaccctttgcctgtcgataaagggtgcccattgcaaaactcagcggagaaattattaagggttgtgtcatcctgtggccaggccctgggtgcctctttcctgcccggaagcctgggtagggccgactgctcactctctccctccatggccctgacccgagagagaatggggtgggggtcagcagggagcttgcagggaatgcggacgacagaccccagcactggggccgtcatagtccctgattcttaggaaatggcagctccatccttctgggtgctcaggcccaaacctcgggttgtcccttcatttcctctcttgccctgcattcgataactggccaggaaatcctgtcagcgccacctttaaaacatccagaacctgcgtaggttttcccctccgcttccacagctgaattcaaggccaccattctctctcctgcagtagcctccttgctgctttcactgctgtcatcgtcacgccccacttcccccgtgcagccaaagggatgctgttagaaccccactcagatcccatctttcctctgtttagaaccttccttggctccagctgcagagcaaaacctgaggtctttcccaggatcacagggccctgtctgatctggcccccatggcctttctgacctcatcctccctcctttcttacttgctcactcactccagccacaccgggccccttgctattcctccaacacactgggcatgacctaactagggcctttgcacttgctgttcctgctgcctggaatgcagttccttcagctctttcccccagctggatgtgccactttattcagatctcatcgcaatgtcacctcctcagggaagccttccccggctacctgctgaactgtcacctccaccatcactccagccctttcatctttcttccctacttgccatcatgttatacatctgttatttgtttggtcaatgcctgtctatctctttagtatgtcaccttccacactgcagggactgctgtctgtggtgatcacgatgctttctgagcactcagcacagggccccgcacacagtaggggctccacagagatttgttcaatcagtgaatgggcgcgcaggaggggtggctgttggcccagatgatgcttcagcaaacatcacaagtgtcctttctctggctgatggctcgaggctggtgcccagaacaggctgctgtggagacggcttccctgaccaccctgtcaagtagctccgactgcccaacccacacccatgctctccagtcccctcgccccacacttcccacagtctcaacttgttttgcttctgtatttttcatgggcccctcctcccccgagaatggagctctctgagaacagggtgtcctctgttggccccactgtcatccccctgagtgtccagtgcaggacccggcaccccatgggaagtgtttcatggcaggttgatcagggtttgcatcggatgccccatctgccgggctagttctggctgggagggtgttaggaggagatgctgtgctcggacctgcgaagtcacgggggagatggggacccacttgggccttaattataacacatcccataatgatatggtgttataatacgcacacaaagtgtcctaatctgatattatatctgggttttgtacaatagatacaatcggctggctgcagtttgctaattcattctcgacctatctccacgctccacctagatgactatcggcttccttaattaagtggaaggcaagctctgcaggcgatgcttgcagtcccagcaccgacgagtccggcctggccctcccataagctgggataatagctactcccacatggggcgaggctggttctgccttcttcatcccaacctcctgtcccagtcttgggcgtgacaggcctgctccaaggcctggtaagccacaaacgccaaccaccaagggctcaaaccggcggcctgtgggccgggccggcctcgagatgtgttgggtttggcctgcatggtgcttttgctgcaagttaaaatgagttgccaactatgaaaaatcagaatgtcgtacacaaacatccagattcccggcttctcttgggaaatgggaagatgcagggactcgggttcatagtcctgggtgctggggctggggagtggctgtcccctctagacaggacatgaccacagttgtctcctgccagtttcacttttatgtccctgcccgatcttgtaggcagttgagtttgcaatccctgctctgggctttaacaatcagttaccccttggcaagatgggacagtgaggctcagaagaggcaagtgacaatggtcattgcacagcgagctggaactcaggtcacaatcattcaacaggtctttattgagctcccactgtgtactaagccctggagacaaagaccacaacagatatagttcttgccttctggggggtgacagtctgttgttccacaggcataccatccacccttattgctggaggcaataggatctgttagagacaggtcctttatgatccctcagagtaggtggaagcagattccccatagcttctgggccccatccaggccagagaatggactctgaaaggtgcaaggggagtggaagcagccatcttggaaggaagctcttggcaagtgttcttactagagggggatgtccctaatctcctacctgggctcccagagagcaggaaggatgagcaaggtgggctcagaggggtcgcaggtgggggtggtgggggacaggaggggaacagagaaggcacagtggcatcagctagacagagcatggggactttcccatcctggttgaaccaagggtgaatcaattaggtccttctaagacaagaagtggagggcaagatgctgaaatacccaagctgcccacctactagtccaggagaaagggctttgctcagccagtctgggaggaagtgtttgtcctcttgcctcccactccactgcaccacccctggcccggaggagaaagtgcagcctggaacctctgtccccagtgcctcaatgctggacccagcttgggccattgcagaccagctggccttccaggagccacatctgaagagcatcaagcagcccacatgctccgtggccagctccccactgacgcggggggatgaataacagtcccagccatcatgtgcatttgctaaaaataaactgacatactttttgcattgggaaacaatgtggattccaaacattctcaaagggcagagaggggaaaaaaggaagaatggaaatcaagttttcgagcttagcaattaattagtgcctgtaaacaaatgactcatgatctttcctgactatttttctttccattttgcgtggattttcgcagggactcagggaagaatgccaaatgagccaagctgataggcaagacaggacccagatgggactgtcttgagggggcgttgtccagttggagagtgtgaggaagagcatcaggtggaagaacaacatgtgcgatggctatgaggactaaaagatcttggcatgtccaaggaacactgaggaggcccatgtggctggagtagaatgggtgaaggggtgaggtcagatagatccacgggacttggaacatacagacccttagtggtgtattaaggcatttatatttgatctagaagacagtgggagccatgagagggttttaaaccaggaaagaacatcatctgatttatataatggtgtcatgtaaaaaacagatgatcaggccagacacagtggctcacacttgtaatcccagcattttgggaagccgaggtgggtggatcacctgggtcatgagttcaagaccagcctggccaacatagcgaaaccctgtctctactaaaaatacaaaaattagctgggcatggtggcaggcacctgtaatcccagctactcaggaggctgaggcaggagaatcacttgcaccccggaggtggaggttgcagtgagtggagatcgtgccattgcactccagcctgggcaacagaacaagattctgtctcaaaaaaaaaaaaatcagaaaaatatattctacatgttctctgttgtttagatgcttctgatacttagatttcctcaacaaatgattatctaattgttatgtttcttaggggtttacacatgtaatgtttgtttcctctccttagaacatcagccctatgataacagggaccttgtcggtcttgtttacttctgtgtcctcagtgcctagaccactgctttgcacacagtaggagctcagcaagggcttttcaagagaatgaacactctgtgcaatgtcagaggcctcattccaccttacagggcagggaggtcttccaaggccagtctggatggtccccaggagaggcaggttttatttagttcaaaataagaagaagttttatggctggaacatcgattctgcaaggaattgaaccccctggtaatggggtcattccagctgggcccatgctatcagtcccacaatggccctctctgatttaagacagtctctgtgctgctcatagagtccactcaaagatctatgaggttggcatgtggctatgcccattgtgcagacagagaaactgaggccagggagtggtgacatgctcaaggtcacatggttacaagtggaagagcctggcttggaatccaggtctgactataaagtctgtgtttttaactccttctctgagccattgacatgggttccaatgcctgctccaccacttagatgccgtgtgacctggggcaagtcactttgctttctgagcctcagtgttttgctccatttaatgggaatgcggccccttgcctctcagggctgctgggggtggcagggaggtctgagccggcacacagatgttcgaatcacgtgcatccctcttccctgccaagctccttcctgggtccttctgccactggcccccgtcctgggctgccgaccccgccttaggccagaagctccttggagtccaccctccagttctccccccgcccactgggtgttgagtcactcatgccatgagcttcttgccctctgcctgtgttttcttcctccttttcttggtaaaaccactgccttttctgattgctaaagctcctcctagggagcaggtgggtggcaggggagaccccaccatcccacagaaccgtctccaccgcttccccatccctcccactctcaccacgccaggctgaggtcactgagcacgaggcctggatggcagacatggtcaaggttgggggtttaattaatcatcagggagcaggcagggctctggctggtccagggccccttgtctgggtataggctggtgggtagactaggggaggtcaaagtaaatattctgggaatgacgttgcttgcagcccatggcaaacacaaacatggaaaagcctatggggatgtgcagtaatggggatggggtggcagaggcggggatggggtggcagagacagggatgagtcttgagaggcttcatggaggaggtgtgtctggagccaggtttgtagatgggagatgaaggacatgggtgctggggccagctaccctgggcttgaatctcagctctgcacctttcccactgtgtgaacttggtcaggttcatgtccctctctgaacctcagtttcctcattttgaaaatggagatgattggctgggcatggtggctcacgcctgtaatcccagcactttggaaggctgaggtggccagatcacctgaggccaggagttcgagaccagcctggccaatatggtgaaaccccatctctactaaatacaaaaattagctgggcatggtggtacacacctgtagtcccagcttctcgggtggctgaggcacaagaatcacttgaacccaggaggcagaggttgcagtgagccgagatcacgccactgcagtccagcctgggtgacagactaagactctgtctcaaaaaaaaaaaaaaaaaaagaaaagaaaatggagatgataatatttacatccccctcacagggtgtggtgatgactgagagatgatgcagatgaagtatatagagcagggccaggcatatagctggtgcacaatacatgctagctattttcattcttactagtggcatagtagaaagcactggaattttagcttcagacagacctgggtgtacatttcagtgttctgcatctccctgttcttgagcaagctcctcgcctgtttgagcctcagtgttctcacctggacttggagatggtttcacttcatgaggtttgtggtgaggatgaggcatgaaattcctgtagattgctcagcacagtgctgggcacacggtaggcactcgctaaggagtggttggcatccactggtctatggcccagtggttaaggcaagggtttgtatatcaggcagacctgggtctgagtcctggctctgcccccatgggctgccgtgaggattatatagagctctagatgtaaagtacccagtttggttcctggtacctaacaggtgtgtggacagtgggaataaaatcaggatctttgtgactctgaagaccagtgttaggccaccccgacatcctgggtgggaaggtgactttcttccattgaaaggtggggaaggctctggccctttcacggtaaggaaacagtttcagagaggcgacatcactagcctaggtgggcacctgggtctgcttgtccgtagagcttgtctttccaaaaggggaaatctctgggttgagggtgtcccatggggccccttgagtgtcactgtgcatgctgctggaacagcctttttttttaagagggtcttactctgtcacccaggctggagtgcagtggcgcaaccacagctcactgcctcctcaacttcctgggctcaagtgatcctcccacctcagcctcccgagtagcttgggacgacaagactgcatcatccgcctggctaatttttaatttaattttttgtagagacagggtcttgctatgctgcctgggctggtctcgatcagtgatcctcctgcctcggcctcccacagtgctgggattacaggcgtgagcctccacaccctgcctggaacacccttttagtggttaatgaaagcaggtgacacataccgtgaagaaggcaactcttggcatgaggttctgggacccagcagtgttcagggcccgccaccccagactggggaccagggcatggctttgtatgtatgggaggtggcttggggtcttggggttggggcagaccccaagaggcctggcctgggcctttttccctctatccaaccagccccacagcactctgtccaattgtttatttcttgttactgttgggcgttttgaggcatttcttccaactgtccagaatccgaacctccttcctatgtgtggagaattttctgctgtatgaggcagatgttctgtctcccacaaaggaggctgtgaacatgagcctcagattctgccccctgtggccagagcatggacaattagctcggccatctaggtgcactgtcctgggcccctggggagtccattcagggtccatccagaggcttcatttatgcacgtcacgtccttctcctgctcagaatcctcccatagctccccattgtcctcaggatagacttcaactcctgcccgtgtcccgcaagatttgacgtgatggagctccactgaccgcccctcctctccctttcacccctccaaccacaggaacctccctcagctaaagtcaatatgccgagctggtacctgcttcagggcctgtacgtttgttgtttcttctgttactatatctcatttcacaggtgaggaaatggggctggaggaggggagaaggaaacagggcgtggtggaaggagaactccaactgaggttgggctggccttggcctgggcctcagccttgtggtaatcacaatccacgccagagactgcctcctccaggaagtcaaaacagatcctttttgtagacggatccctctccttgcctctgctcagcctgacttaggcattctctcgggcatttgggtgtgtgtgtgtggaggtgacattgcccccacaggggtggaaattaattcttatggggtaaaaaacatcttaatttttttatgtataaagcgaagataggccgggtgcggtggctcatgcctgtaatcccagcactttgggaggccgaggcaggtggatcatttgaggtcaggagttcaagaccagcctggccagcatggtgaaaccctgtctctactaaaaatacaaaaattagctgggtgtggtggcaggtgcctgtaatcccagctactcgggaggctgaggcaggagaatcgcttgaactcaggaggcggaggttgcagtgagcagaggtggctccactgcactccagcctgggtgacagagcgagactccatctcaaaaataaataaataaataaataaaaataaactcaccttaacttgatttgaatccacgcaatacctcaactgaattcaactcaacagaactccactcattgtgtttagttgaactcgactcagcttaatgtgtctccactcaaccctcctttgctcagtttgacacaacccagctcatcagcacgactgacatcagccctgcgcccctccactcagcagagcgcagttcaggtgaaaactcacctctacctgactcaactcaacccaactaactctgcttaactcacctcacctccgctcagctcagctgacctcagttcacctcagtttacttcagctcagcgccactcactgcaatcccacccacctcagctcagctcaagtcaatcctgctctgttgaatgctcagctcagctccacccagctcctcaacacacctcatctcaacttttacaagtttttttttttttttttttttgagatggagtttcgctcttgttgcccaggctgaagggcaatggctcgatctaggctcactgcaacctccgcctcccaggttcaagtgattctcctgcctcagcctcccgagtagctgggattacaggcatgtgccaccacgcccggctaattttgtatttttagtagagacagggtttctccatgttagtcaggctggtctcgaactcccagcctcaggtgatctgtccaccttgggctcccaaagtgttgggattacaggcgtgagccaacgcacctggccaagtttttatttatttgttacctttttagagatagggtcttgctctgtcacccaggttggagtacaatggcaagaacatagctcactgcagcctcgacttcccgggctcaaggaatcctcttgcctcagcttcttgagtagctgggactacaggtacatgccaccatgcctggttaattttcaaattttatttgttgtagggatagggtctcactatgttgtccaggctggtctcaaactcctagcctcaagtgattctcctgccttggcctcctcccacagtgctgggattacaggcttgagccactgcacctggctaaagtcagtttaagttaagtgtattcactcgactcacctcaactctctcgactcacagtagacccccactgtgattgccacctgccttccccagacagcctccaagccttgcagagaaggagttagcctccaggtgttcccagtttagctggggaccctgacatgtcctttcagctggtgctgtcatatgggaaacacagggcaccgcatgagcagtctgtggcagccccagaaagccccagatggttccccacagaaggaagagtcagcgcaggcagaacagtgggaggaagggtgtcctgggcagagggaacagcacgtgcaaagtggccgaggcagggtggatggaaccctctgagacccagaggttgctccagctggagggaggagtggagaatgaggatggtgtaagtgtggccgggggacaggcacaatcccccagggaggacctggcctggacagggggagacactgcagtactgagcagagaagtgtcattttaaacaccttcctggctgctgggggacgcatagagctcagaggtgagactggacttattgtgtagggacagagccgagaaatccagcgctagggggctggtggggagcagacaggtggggagcttaaggagagagtttaggaaattaaccataaaaatgaccagaaattgagcacttattctggtccagtccttgtttccttaccttacaggtatcaatgaatttaatcctcacaacgattccatgaggtaggtattattatcaaccctattttgtagatgaggaaactgaggcccagagaggccaagacatcctaaggagcggaactgggacctgaacacaggctttggtgctccagaggcctcaggagcagccggacatcttatgcaaaatgcccatggcaggtgcctcctggaggccggcccctgccccccagcacacagtaggtgctcagggccttctttctctgtttgtgggatttaaatcatcatcaccacttgagttgggagtgcccgtccactattcaaagggagaaactgaggcccaaggaaggatttgagacacgggtaggaacatattctacagacaggcaggtggtatcactggggtcttcttcagccattgggaattttttttttttttttttttggagaaagagtctcgctctgttgcccaggctagagtgcagtggtatgatctcggctcactgcaacctccgcctcctgggttcaagtgattctcctgtctcagcctcccgagtagctgggactacaggcacacacccccgtgtctggctaatttttgtatttttagtagaggcagggtttcgccatgttggccaggctggtctcaagctcctggcctcaagtgatccacccacctgggcctcccagagtgctgggcagtggcagggttacaggtgtgggccactgtgcctggccatcattgggattttgattcaacgtgtgtgcattgaacggccctgtgtgctgctgtggggagaggatcccaccttcgtccctccaatgctgagaattctcccgtggctgccctccgtcccgaggatgcaatctgggctcctcactgtgccccaagaagctctgctggatctgccccagcctcccctgcctccctggcctcacctcccatgactctgccttcttgcccctgcaccagcctcctccagcagcagtctcccaccccaggacctttgcacgtgctgtccctctgcctggaacactctcctcatgacagccccatctcctccatgggtcctcaactctaaagttgcctcacttcctcagtgtggcccccccgagcacctgaactgaagccccccagttcttatgtatcacatcacctcattgttttgcttttatttttcaatgttctgcttccttgctggaattttcctgtctatttcctgcctcctgcaggggacagagctactgtaggcaggatccctgtgggtcttgttccctgctgtatcccacagcccagcacacagtaggtgcttaataaacattcgtgggatgaatgaatgaatgaatgagtgaaggaatggatggaaagagcttaaaaatgtaggtgtggagaggaggactggcaggcctgggcccaggctggggctgaggcctcctctcctgggtctccctgcccggaggaggggcccctgccagggcaggagggtgggtgttgggggcagggagcagggctgggcgagccttctctgttccactgttttcatcctttcggtaattatgggctcagacactcctcgatgccttcccagaataatagccgggcctgttatcagtggcatctctgggaccttctcacaaacagtcattaatcaagtctcactgccaccctgccctccctcttggttgaagccgaggcacagagaggtaaggccattttcctagtgccacacagctgacgcagggaggatgggctgttttgccctgaaccctaaggtgcagggtaggggctccttctccctgttccacgtgggagaagtctctgagcctgccatgactggggggccctgcccccaatttcaggcccccagccctccttgaggcctcaggggcctcccaaggtggcctcttaatcattgccagttaattaaggaggttaagcagctccccggggccgaggcaggcctgcccagggagagaggtggcagggcccggactgcatctcacactgaggcccctgcttcccagcctgagtctggcatgggcgttgtgtctctgtggtgcccatcaccggacctgggggtctctgggggaggcgtggggcctccgatggggccatagagttccattgcttgggcagtgccccctccccttcttcgggggtgtgtgggaggtgctggcatcacttaatgaggcctccgcggctgccaaggagagctggaggagttgaaacaggttctgggtggggtgagtttcgtgggctgggcagaatccatggctccatgccatgtgggcgctccccagggcagtgggggtgggcaggtgtgggacccccaaatggcccctgtgtccagccctctgccctgatgggtgggagcagaggaagcttgggaggggattgtggagatgacagaggatgacagacaggaatggaggttcacatcccaccctcctaggccccccactgcccagcctgtggggaccacaccaagacccaccatgctggcagcatctggggctccggagacattgctaatgtgtgctctgacacagacttgggcctcggtcttctgacctgagaaataggggtggttggatgggataatcttgggctcggagctttagtttcggaatgacccatctatagcagagctgcctgacttgctgtgcgaccttaggcaagtcgctttcttcctctgggcctgtgcagctccggctgtgaccccgtggtggtggggtggacgcagtgatccttatctccgctgaggttgccagtgcttcgcaaggggcacctagactgctttctccaggattcttccagcaaggaaatcattcagtgcatctctcccggccctggggaagcaccgaggctctggattcaggccagggaggtttagaaggaagctccccaaggccaggctgtgggtcctggggtctggagggcagcccttctgtgttactgaatcctcggggccacttcaggctcaggtgaggctggatcaaggcgggacccagagcccatgggggccccgtgggttctttgtctttcccactgttttttcaggtcacttttatggatatataatttatatacagcacgattcaccctttcgtggtgtgcagttctatgaatcttgagaaacgtatacagttgtataaccagcaccatcaagatacacaatattccatcacagcaaaaagttccttggtgcctcctttgttatcaatccctttcctactcccagcctctggcaactaccgatctcccccaactttttattttgaaaaatttcagacttggagaaaaatgccaaaacttcacaatgggccaccaagtgtcccttcccccagaatccccgactgcgaacacctggccccatgtgcattcttggtcttcctctgtgtgatttttgctgagctgtttgagagtaagttgcagacatccttacccttcaccctaattacttcagcgtgtgcctccgaaggacaagagtgttctcccacgtaaccatagtgccaagatcactcctgagaaatttagcattgattcaattacattacctagtctccaggccatgttcaaatgacttggactgctccaaagtgccctttataaccatttttcatctgttttttttctttatttttcctggtaccaagggttaggccctgcctttggtggcacatctctttagtgtccttttatctgggacatggaacattctcccggctcttgcttgactccttttttttttttttttttttgagacggagtctcgctctgttgcccaggctggagtgcagtggtgcgatcccggctcactgcattgcttgactttttttaaaaaccactctcatggtttcctataccaggaactgccaggggaattccctggggatgtgagtgccaggaaacgggggctgctgacttgggggacatgggatgttcttagggttttttctgaaaagtcttgtttaaaagtaaagtggcagtagaaggagagagagacttgggttcattggctcaacttttaagaatgctgaaaattcaaagcaaaaagagacactacccaatttgcaattgagaggcatctctagtcctgtggttgaggttcaaatcccagctctgcctccccttggctgtgagcccttggtcaggtaacttcacttctagagcctctgtttcctcatctgtgcgatgaggataatagcagtctgtccaccttgccctgttgttgtcaggaaatgaatcaatgcatttagtgcgtgaatagtagcaacttcatttgctaatttgctgatagtatttttagacatttctctctatagttacagatatatgtgggatatacttacagagacagctcatggatatatgtgaatcatgcattatataaattaggccatcttcttttctctcaatactttatcacaagcattttcctatatccacaaatggagcacttgcgcatcgtgtataactttaactcattttgtccatagataataccatgtggcaccaaataccaaaggtacaacaagcgtgcagtgaaaagccagtctccctcttacatttgtcttcaccctctcagctcctcactgtgacagtcttttgtgttgcttttcagaagggttctgtgaacatgtgggcaaaagcatgtatttgctttgctttcttacagatatcagaggactctacacactagttctgtgccttgtgattttcagcaacagtagatcttgatgatatcagtacgtagagagcaccctcctttttcaaggctgtgtggcgttccatggtggacacagagcaggatgtaaacagccagttccttagtgatggtggcttgcaggcttttgccatgacaaattgcaactgtgttcttgtgcaagtatatccatagggtacatcctagaagtggaattgctgcatcaacggggatcacgaggtcaggagatcgagaccatcctgggtaacacagttaaaccccatctctactaaaaatacaaaaaaagaaaaaaattagccaggcttggtggtgggtgcctgtaatcccagctacttgggaggctgaggcaggagaatggtgtgaactcgggaggcggagcttgcagtaagctaagatggcgccactgcactccagcctgggcgacagagtgagactccttctaaaaaaaaagttatatatattttgaattttgacccaccatcatttttattttatttatgattattattatttttgagaccgggtgtcactctgttgcccaggctggaatgctgtggcacaatcttggctcactgcaacctctgcctcctgggctcaagccatcttcctacctcagcttcccgagtagctggactacaggtgtgagccatcacgcccagccaatttttgtattttttgtagagatggggttttgccatgttgcccaggctggtcttgaactcctgagctcatgcaatctgcccacctcggcctcccaaagtgctgggattacaggcgtgagccactgtgccggctgccaccatcatttgtaatagctgcacagatcctagtgtatttaacagtaccctactggtggacatttaggtggttccaacttgcccttcctataaacaatgccacaatgcacatctttgtgcagccgcctttgtgtgcaggacagtcagcttatggggaattcccgggatcaacaggaagtaccaagaaggggaaactgaaccgcaggggccagcatgaccccaaggcctgtgggtatggatggtggctggactggttggatgggtatggatggtggctggactggctagaggcttctgggctctccctgtccccggtgtggccaaagggtcctagagtactggactcctctagatcctcactgctcaaggtgtggcctgggagccacagcattgaccctacctgggagtctattagaaatgcagggtctgggtcccccctaccccaaaaccctgttaaatcaggaccaacattttctttctttcttttttgagacgggctctccctctgctgcccaggctggagtgcagtggcgtgatctctgctcaccgcaacctctgcctcctggttcaagcaactctcctgcctcagcctcccgagtaactgagattacacgtgcacgtcaccatccctggctaatttttgtatttttagtagagacaggtttcgccatgttggccaggctggtctcaaactcctgatctcaagtgatccacctgcctcagcctcccaaccaaagtgctgggattacaggcatgagccacagcgcccagcctaggatggacatttttacaagtctgcaagggattcaccagcacagctgaaaatgagaagagctgccctaaaacaaacctagacactccaagactggagagaatggctcagccttgggtctggggcgggcctgaggtcacacctggcttcaccgcctgctggctgtgtgatggaatgcaagccggccaacctctctgtgcctcggttttctcatctttaaaacaaggaatgagaggatccctcctctcacagggaggttgtgagaatcaagcatgatcgttcacagaaaagcgtttagcacagtgtccgcacttagcaaatgctcacccaaccctgtgattttgatggttatggaggctcacgttacggaaggcgatgcgggagtcagatctgtctgagttttggtttctgctctctccatctctgtcactgtcactctccccgtgtctctccagccctgttgtctcttcatatccgcttatttctctctgttccgccaccgcccgcttcctctgtctcggtctccttcttcctgtctctcagggtctttgtcctcatttccacctggccataggagctttgcaagcatctgtgaaaatgctaaacatcgggaaaaatggagctaactacaatgataaaagtgcaaactaaaaattaacaatactagaaaagcaaaactatactattataaaaactcaaaaacagtaacaaaaattatgtttttggtaggtcgtggggcttttccagcccatttgatgggtagtggcttggagctgcagggctgcggggccctgctgggggttgcctctctttcctgttttttttttttttttttttgagacagcgtatcattctgtcacccaggctggagtgcaatagcgcaatctctactcactgcaacctctgactcccaggttcaagcgattctcctgcctcagcctcccgagtagctggtactacaggcctgcaccaccacaccagctaatttttgtatttttagtggagatggggtttcaccatgttggccaggctggtctcgaactcctgacctcaagtgatctacccgccttggcctaccaaagtgctgggattacaggcgtgagccaccacgcccagcctctttcctgtttctttggaccccttgcagccttgaacctaaacagagctgagtgattcagtggagatctggcctcagctggtcactgatccccttctctgtcctttcctcactgcatggccctgggaaggcacagccactgatctatgttcttccaactcatttactaagtgcctacaacaccaggccctgggacacaacaccgaacaagatagacacaatctccgccttttggtgcttatgttctaggacggtgtgcatgtgacagatgatatggatatgagtgaataaacatgcggaacaattgtatggtgctaagttgtggttgtgtgatagagaaaggcgtggggctgctttgcactggggatgagggtggggatctgggaggatgactctggccgaatttagagactagaatgatgagaaggagctgggcctgggaatagctggaagaaggacattccaggcagagggaactgcaagtgcaaaggctctgaggcagggacaaacttgggggtcagtcatgattgggagatcttggaggaggaaaagatctcaagagaaagacagtctttctttgctgagtgtctcaagcaagttacttgccctctctaagccttagtttccccctgtgtaaaatgggaatgttaaagacacaatcccaagagatgagtgagttttaaatccagtggtgggccagaatttctatactggagggtcttaggggatggttgggctatggggtgatttgtcttgaatttgtgggcttagcagcactactctttttacttggtttacttgggcggctttggggggtgatgatggagattatttgtggttgcaagtgatgccccaatttccccatggccgagcccctgatttcaggagttaatagcctacagcactcggcacagtgcctggcacagagcaagtagacaggaatggggagggcattccaggtgggaggaaaggcgtggagatgggaatgtttaaggcgtgttaggggaagagtgaggagaccagcctggctggtggggacgggtgagtgagaggctggaaagacgggttgaggaccaggatgagacctcgaatggcatgcaaaggagggtggccacagcccggaggcaggaggaagccactgtgagctctggagcaggagaagccgtggaaataggctttgtttctggtttgattctcaatatttttaatgttttactattcaaaaaaatttaaaggataagaacagaagtttccacgcagctatcactcaactgcctggaaacttatgttcttctgtgttcttttcttccttaaaaggaaccaccccaatataggggatccccccatatccctgcccagaaggatctctcttagaagtcactgcaacctgtgagctgagattgcaccaccgcactccagtctgggcgacggagcaagactccgtctcaaaaaacaaaacaaaacaaaacaaaaaacaaaaaataaacaacaaaaaaaccagtcactgcaacctggatttgatgctcgtgatttccctgtgtgtctttatccttctcttgttggtttgatgaaggtatccacctggtttgatggaggtgtaaatgcacacagtaaaacacacagatctttttttttttttttttgagacggagtctcgtcctgtcgcccaggatagagtgcagtggcacgattttggctcattgcaacctctgcctcccaggttcaagcgattctcctgcctcagcctcctgagtacctgggactacaggcccgtgccaccacgcctggctatttttttgtatttttagtagagaaggggtttcactgtgttagccaggatggtctccatctcctgacctcgaaatgcacaaatcttaattgtagtttgatggtcatgggatcacaccagatcaagatgtagaacattcctagcctccaggggctcccttcaaaggtaactactggtctgattcctattacgatagattggttttgcctattcttgaacttcatataagtgagcccattcagtctgtgctcttttgtatcaggcactttcacttaaactcatccaatgaggtctatccaagttttgtgtctgttttcacggctgtggagtattccattgtctaactagaccacagtttgttgaatcaccctatggtcaacagagatgggggttgtttccagtttccactattttgaatagtgctgctgtgaaccttctcttacacatccgacagtagacataagcaggcatttcccttagtctatatccaggaatggaattgctagatgatgagatatgcacatgcttggtttttgtagctatggccagtttcccaaagcagttgtaggacatctttagacttttacacacacacacacacacacacacacacacacacacacacacacagacacacagacacacgtggaatccctgagggattcggggagctgctttgggttgtgggtgggattgtacagatggcgtcccttgtacatttgcttctgcatcctgctttttttccacccgatgttctgttctggagttccgtccccgttggcggagtggcttgggtgcatctattggttgtccctgtgggctttgtcgtggggacagaccacagtgctcttcctcaggcttctgctcctggacatttagcttattcccgactgggactctctttttggcttttcatgaatatccgttatgcgttgggtgaggccagctaggactggccgaggtgcagggtggacattgggtctatcgtggtgggagatggggacgaggggctggtggcacagatggtttcaagggacttttagggaacttggttatggtgggggaagaaagaaacaagacgggggccttgggggccagaagcccaggtttaaatccctggtcccccctcctagctgtgtgaccttgggcatgtgactttgcggcttggagcctcagttacctcatctgtaatttgggaacatcaaccctgcctgataagacggttgtgagggttgagtgagcacagacattcagtggacctggctaggatttgaacccctttattaactgattgacctcgggcaagttgcttcacctgaacctcagtttcctcatctgtaaaatggggatgataataatacctgcctcccagcaattttatgatgatgaaatgagatttcggacataaagcacttactagatgctcaatacctggcggtctcttgttattattactattgcggttgacttctctgcctttccctccagaaggtgggtggctaaacagcaggaattggtcttttgtccccaccttcctcctgtggctcccacacaggacagaggtgagggtcatctgcatccagggtgtagacctcgagtgagccctgcccggctgggagcctcagttctctcctgtaacaggggctcatggcagtgcctacctgaccaggtggcttcccaaggggcacacgatcttgttggggagaagagctggtcaggagggacctgtggacgggagacattttccgagcaatgttgtggctgatgccatctgggggtcctcccagagatgggcgggggatgttgggctgagcccctgaggaaggaagacatggcgtgggagtgtaagaagggagaagaggaatgattccagccctgctgacctcctgaggggaggtttcagctgcagggatgccagagccgcttgctgcagcggggacactcaggccacagcgagaggaaggctggagtcctgggttcccaacttgccgctgatgtccttgtgctgtgtgaccctgggtgcctgtcactcttaccctgtgccttggccttcgttcattgtgagaatctcagacttgctctctcttctgctgggtttcccggcccccgcagaccccctggcctggcccctctgccctcatggaggccgaggccagggcccagggccagggctgcgcaccttgacaacgcgcccacgccgggcacaaaggcccattgttcgggcccacgttggcggggaagcgggcggggagcagccgcctttcacccaacccgcttgtggtcggcggggactgaggagcgattcacagaggcccccgccccctgtccgggcatccagccaggatgcctcccaggcaggcacccttgccaagctgggcctgtgctacccagaactgggcctcagtttccccagctgagaaaagggaagcagagcagctctgatagtggggtagagcttgctgtttggcctcattgccctgagatccactgctctgtgccttccccaggcacagatcagctgcccctgacatgccagaggaggccacgggatctggggctttggggcctgacaagtctgggtttggattcatgctggatgattttgggtgagtctgttcagctcatgagcctttgttctcccgcctgtaaaagggggcttggagtccatgatcctcagaggtaaaatgagagaaatgacacctcagggcggcattcattcattcattcattcattcattcattcattcattccaaaaggtgtactggctgtcaactctgtacaggaccagctatagaatgttcagtgtcgtgtgcaaaattaaacgtgatggtccttgttcaaaattaagaatttcaagaggtaacggcattaatccaagcatggggccctgtgtgaaggcatgcgttgcaggtctgtgaggctcactctgcctgtgtgccagccgttatcccaggcaccaggaccaggcactgggccccactaatgagagagggaaaaatttctgttgtcatggagctcataacctggcagggggacctagagtccctgaaccttcccaaggccaggtgccccaggaggcctgctcctcctgggcctgctgaccaggccagcggggtgagcggaggcacccaagcttccttcgaggctccgatgtcagtgaccaccacatctggctgggcacccacaataataatggcttacatttgcataagactctgcccgggctgatccaggaccctttctcggatgaactcagcatcttcgtggcaaccctatgaggaaggcgaggcagcatggctcaccctttgtatggatggagaaactgaggctcaggctcactggaccattcagccagcaaatggcagaggcaggatttgaacccaggctgtctggtgccagggtcttcatttcctcattccatcctctgtggatggggacagcggtgagcgaggtggtttatgctggcaacagaggccctgctggggattgaggctgggaagggtgcgggtgtgctggtggcccgccagctgccacctgggttggccctgctgtgtggccctgagtcacagcgctgtgtcctgggaagctggttgtgctccgggcacccgtggggcctgagtcacagcagagcacaccctaccttcctgcctacctcccacctgggcccagggacaggcaggccctctgagcaggttcttaggcaggcagtcacatctctgcccaacgtcaggggcaagaaagaggcacctgtgtgtggctccagaagcacattcctgcttcctgtcactgagcccaaatccatccttccaagctaccctttggatggattagctggcaggtaaagtactgagctccccgtcactgggagcattcaaagcaggatagcctgtcaggggtgctgagaagtgttcctgaatcaggtagggcctgctgctggagtatgtgaattccaatgccctaaacatgtgcttatgtgctaatttttgaatagctatggtgagcaaatgctacaaaatccaaaagtagaaaggggtatggaatgaaaggcaattcctcactctctcctttccccagcctctgactccccctccttagaggcagccactgttaacctgctattttggccagagttaatttatgtacatacaaacaaatatctatgttgtccttgcctccctcccacccttccacacaaatggtagccaatatgtttcttacagtgttctgctcctcatttttttttttttttaattatttgacaacttatcctggagactgttctagatcagcacacagagctgcctcattcttcttacctagccacatggtattctggccccttcccttttaaaatctataactgatttgattaaaggaattttcaaccctgaattctacatattgggatctgcactgtcctttgctctggtggtggcctgagaacattttcaaaatttggctggagactataagctctttccacatccgtggggatttttgtgttctgtttttagttgactaaggcgagggcagcttttcattcacagctctccacgccaggcaggcactggtaatccactggtgagccccacgggcatcagctcatctgccgacagtgtggccaggctgtgggaggagtatgtggtggcagggagcccagaagaaagggcttcctgtgtttgtttaagtaaggggttagtgatggctcctcagaggtgggactatttgggcagggccttaagggatgcataggagttcctacgaggagaagtatggagatgggcttgccagacagaggaaactgcatgataagcgaaactgcctggtagatgcagaaactcctaccagcatccacttactgaacacctactaagtgccaggcactgtactacgtactttacaagtcattgctgcatttcaactcttgacagttgtaggctattactagtcccattttacagataggttagttgaggttagataggttagaaaagcccagtaacttgctcacagcaacacagctacaaatatcgaagcctgggtttgaacccaggcgacttgggctcttggccattctactatcccacaagggtcaaagggtagatggcgaggtcccgaatgctagatcttgacctttcaaccttcccagctcgggtcctgcccctgctcagaggcccttagttgttccccactactccaggactcatcggcctgagctgccctctccctccagccagggtgggcacctggggcagcatcagcctttctgggtctggctgggtgtgctgggtgctgcaggaggagccacacatggtactaatggagccagggagcaattaggggggcatataccctggcctgtgcccactgaccggttttggatgtagttggagatggaactggccctctaggctttgtcccctggaggcctagggactctgtcttcagggcagtgctggctgtcactttggcccagcccctctggcttcctggttgtgagcagcctctggacccagagaactgttctcccgtgtaccctgttgggcactgggcctggggctttttaaacctcatggattctgcaacgtgggaattcatccctccatttggcagatgaaaaaaagaaggttcagaaaggtgaaacgacttgttcaaggccacacagcgaggaaagggcagagccaggacaggaatccagaccctgagtttgactcataaccaccctccactcctgcctccgtgcaagaggattttccaacctgtctgctgcttggcaggggcttaatcaacctccctctctctctctctctcctggtcttcaggaaaggggcaatgagcccattgccacggggtacggcggagcttggatgctgcacccaggactgaaagggggacctgtgggcggcctctgcctctccccgcgcagcgtcaggacacaggcccacattccctcctggcttctccctgaagggagagagaataatagttggttcaaatgtcaggcctgctccgtgctggtggggagactggttgagcaggtccgcaggagggacggagggaggaaattattaataattgcaaagcaaccagccacactacaggccttgagttgtgtctgcgtttgtctttggaggtgtggagttgggggtgctgatcctggggacccagcccaggggtcaggacagcctggggaccagctgcagcttcccagaagcctgtgtgggtaggggagatgatgggggcacagagtcagccacctacccctggcaaggtgggacacatcccagcctccccatcttccactgactcagggaaggatctgtcaacatctaggggagggaggaaagagcctactacgtaccttcaggaagcttctcattaggtgatggatttaatcctcacaacaaccagatgaggttggccttgctattatctccagttggggaaactgaagcacagagggtctaagggtctaattgtacagatttgaatccaggaggtctgagtgcagctggatagtcctttgctgggatgggaggatccccattccctgggaacagccacacccattcccagaacatcaccacgatccctgctgccttcccttggaggacaggagttggtgtgaagcttctctgagcctcagttccctcatctatggaataggagccagagttcctccctccagggtcagaaggcagctagctgataaggggagcaggtaaggaggtgaagggtcggtttgctggctgctgcctccacctcccttccagaaccagtcaccagtgacagtcccttcatcaagaccctttctttcctcccttctccagcacccacggtgaggtctgaccaacagccgcaaccatagtggcgctttgctgagtcttccttgagctccctgtgtgcctaacgcagagcttctcccctccccggggctttggaaaatctgctctgaaatgtcttgtgagtgatcagtttacgcttcaacaggaaaatgagttgaatggtggaacttgaggcagggttttggggaatggacagtgggagttctgggagtctagagccagcctctgggcttggggttagcagggccgaggcatgcccagatcgcatgccatcaagccccaggaccagccgcatctgtggggtacctccagggcgtccccctccttggcctgccctgatgggctgataagacctagcctcggaggaggaggcagctgtaattacaggccttagtggtggcgggcaggcaagtcatgaggtgggggtgactcagacgattgctccacggacagggtggaggcgggggccacccatctgcccctcacccagctggcctgagatgggtctgggcacccagggagcggcccggccagggtcccatccttgggcctgtgacccaggcccctgtgccacttggcatccacgaagctggcattgcactggacttgggactggctgggttttcccctttcttcgtcccaggcaatagcttctgggaagtaggagtcagtgctcagaggcaccaatgggaggatcatcaggactggaccgagagagccgcagactcgggggagagtaccgggagtcccagaccacagaaagacagaacctcagccatgtgcagactctgagaaccagcagatgacggtttctagaaccaaatattttcaggttcaaggattcagggactagtagatctgtagaattatcgatttataagatcacggacctggttgcaattggttccagagaattcatatatccattgagatagagatttaaaaaaaaatcacagcagctgatgagttcaggagtaaattaccttggtgtcttcaacttgctcccacatggatcaggcaagaaaagcccccccaaaagtagaaatatgcatctttctcatttaacctagctagagggaaggcccgcagactgaagaattaacaactggtaaattgaggcaatcattgtactaatcatttgactgtctatgggcttaaaaattgtcaaaataaaaagccaggaaatagtaataaagaaaaggaaatgtgggtcaggcatggtggctcacgcctgtaattccagcactttaggaggctgaggcggtaggatcgcgtgagcccaggagattgagaccagcctgagcaatatattgagacctcgtttctatgggaagaaaaaaaaaagcaaaagaaaatgaaatgtgaataccaaccaggacattacaaattatgcaacttggtaatctataatattatgactttccaaatctatgcatctgttattctcttcattcactcattgtatattttatttatacacttttgcagagtacctacgtggtcacaaggagaaactgttctaaggctttacaaatgttaactcgtttaattcttatgacatttctaagggcattatgaatagtaactcattgaattcttacaactggatgaggtaggtgctgttatgatgcacgttttacagataaggaaactgaggcagtgagaggtggagtaacttgcttaaacggtgctcactgtgttattaagcctctactgtgtaccaggtgctgtgctagacagagcagtgaacaggacagactttgtccacaccctgggggaacttggcagaggagacagataataaacaagcatgattgtttataagttcaaagcggaaaataagcctgctgctttgatggaaggtgggggtatggggtccccaagattgagcgaacaggtgaggctcttctgaaaaggtggccttttgctgagacctgaagtacgaggagaaccctggatttgagagacatgactgtcatttgcctgggctgtgccctctgcctggactgccctcctgcttccggcttctctatgccaaccttgccttcactggtccaggtctggctgggcggcacctcctctggaggtgggaggtgaactgggggcttccccagccccagagggaatctgtcctccccctggtcttttctatcctcctggttcccagagcagaccttaaataagggaagcctccatgtgactcagcggcaccacctgtgccaggctctgtgctgggatctcacccaaccccgagtggggagcatagttttctcctggggaggagatagaggctcagagaggttaagagacttgcccaaggatgcacagctaacaagtgttcaaaggaaaatccacactcaggactacaggctgtcttttggtgactggtttacctgctcacctgcctgcctaccctgggcacctctcgagggcaggtcctgggtgctggagtcagttctgtgtaccagcatcgcccagccctgggtctggcctacatgggatgattttcccttcaccaggctgagagcatgagacatgaaggactaggccagggccctgggggctagctctaccccaaggggaaggtggacacgggcctgagcccctaggctcccagacagaccctgtgctggctcccgccctctgtcccccttcttccctggcccaaactggcatggtgccttccctggctctcttaggctgctctgcccagggctgagagggatgcaggggcccagatccctatccccagcagacaataacctctggggccactgagcagatggggaaactgagtctcagctgagtcaagcctgacacagtgggggtggggtcagggtccaggaatcttgtgggttcacaagcacaggcacagaggcgggaggcatgtgcacatggacacgcttgctgtgtacatgaggctgatgtgagccaatgaggacacaccattggtgcagatggcactgggaacacagccgcccacacacgcccatgtgcacacgtgtgcataaacaaccgtgagtgccttcctggtttaaatcccactctacttcttagtcttgctgagataccgcacttccctgggcctcagtgttcagatctaggaaatgggggcatagattgaagcctgggtaggctcgagcctggtttagccatcctggccccttttctgcatggggcccggggacctgccctggaggtttgaggagagggttcagtgcggtggtcttccccatgccgcagtggacattgggagcccccttggggcaaatggcctgtgtcactcaccactgggctggcccggactctgctccccaggctggttcctggcactgactggcataaggccaggctgcctgggtactcagctcccatgctggccacaggggctccaccaggcgttgggacagagaggtgtctagaaagttctgccttagacaaggggtgcctgtgtgcatgaggggcaggctccgctcagctcccctccccgtgactctcttgctgggggacttcgtagggtggaaggagcccaacaccagcgtccccaggctggattcaaggccagctccacgctctggggctctgaggcctgggagcctcggtcttctcatgtgcaaaatgaagagcatcaacccacctgccgcagggacaaaacaacagcatagtggctggcacacagtaggtgctcaacaaatgccagctgtctagctgcagactacggtcacagtttcattcattcatccactcattttgttatttatgtatttgagaccgggtcttgctctgtcatccaggctggagtgtagtggcgtgatcacggctcgttgcagcctcgacctcccaggctcaagcaatcctcccacacttagcctcccgagtagctgggattacaggcgtgtgccaacacacctggctaatttttcgcatacaaaatcccttctcgacgaaaaatactcctgggctcaagcgaactcctgggctcaagcgatccaccctccttggcctcccaaagtgctgggattacaggcatgagccagtgtgcttggccccatcattgatttaacctgtatttattgagaccctactatgtgtcaggccctgaggggagtgttgggatcacatcacagaacaaagcggacagaatccccgccttcccagagctgacagtctagtgggagagatgggcattgaatgagtaaacagcatcatttgagattgtggtaaaggaaatgaagcagagagctgggatgcggggtgaccagcaggacagccagggagggcctccaagaagcaggcatgacctaagagaagggtgctgggggtggatgagtggtaaaggtaagggccctgaggtgggaacaagctaggtgggtcaaagaacagtagggaggccaccgtggctggaatagggagagtgaaagggagagggctggagagaaggggagggagtggaccctgcggggcttcgaaggcaggagtgaggaatttgaatttcattccaagggtaattattatgaacaaagaccaaagttatgaatgactacgagacacaaaatgcaaactcactgtgattcacttccagcccagaacttgggcactttggatcaggaaacttaaagaaaagcacctgcacacacaacttctctgtggctagttttgtttatttcttgtagagatggggtctcactacattacccaggctggtctcgaactcctggactcaagcaatactcccactttagcctcaagtgctgggatgacagatgtgaaccactggccaggctatgacgttcattttagaaagaaatacaaaggtaacaggcctttgccatttgttgaatgtaaattcagagcgttacacacaaatgcgagtttgttagttgcaaaggcagtcacggtctctgacttcagtgctggttgtgagagtgaggtgagctggggagggggcatgatatcaccagcccggatttcaacagtgcaatgccaattggggaaggcttgggagatcagctggtccaccccactgactcccagatgaggaaactgaggtccagacgaggggaagtgagtggccaaaggtgacactgtgagtcagaggcagatgcgggacttgaacccaggtcccctgactcctaacccagactttctgagaaatgagtgtcttgccacgtgcttcccctttgccctttcctcctggacagtgtcagctgtccttggggccaggaaggagacatggaggccaggggtttctggtggaccccaccacagggcttctcatctgaggcaccgctgggatgttaagccggatggtgctttgaggtagaggctgccctgtgctaggccttcaggccatttttcagacaggatcgggacttggagaccagggcccagggatgccgcttgaggtgacagaactggaaaagatgaagggaagaaaggaatgtaacccacattgaataatgaagcctgacgctttaaccctacaatggccattgctggatgttgacgtaaacaataggtgtctacaggatgaattagccaaacgacaactccggtgtgagcagaacgggctcattgggtcaagacacaattccaccacagaacgggtttcacaaaggaccatgtcccatcaactcagcaatgaaaccatcgtggtctggaaacctgagatcaggacccacagaatgactggcggaatgacagaccaaatgtggaagatgttccaaccaggtgtgaaaaagtcattctgtgaattatgagagtgtgggaaaaacatactcactggaaaaaaaatccagttgttaagatagattgtttatttatttatttatttttatttttttgagacagagtctctctctgtttcccaggctggagtacggtggtgtgatcttagctcactgtaacctccgcctcctgggttcaagcaattctcctgcctcagcctctcgagtaggtaggactacaggcgcagtgccaccatgcctggctaatttttgtgtttttagtagagacggggttttgccatgttggccagactggtctcaaactcctgatctcaggtgatctacctgcctcagcctcccaaactgttgggattacaggcgtgagccactgcccccaaccaaaatagagtttatttatttattttttcttttgggatggagtctagctctgtcatccaggctggagtgcagtggcgtgatctcaactcactgcaacctctgcctcccaggttcaagtggttctcctgcctcagcctcccaagtagctgggattacaggcacaagccaccgcgcccggctaatttttgtattataagtagagatggggtttcaccattttgaccaggctggtctcgaactcctgacgtcaagtgatccacccgcctcagcctcccaaagtgttgggattacaggcatgagccaccgtgctcggccgatagactttatttttaagagaagttttaaatgtacagaataactgaaaagattgtaccttatgaccagtttctcctattattcatgtgtcacattaatttggtaggtttgttaccatttttaaattttaagtcttttgaggcagggtcttcctctgttgctgaggttggagtggcacaatcatagcgcaccgtagccttgagctcctgggctcgagtaatcttcccattttagcctcccaagtagctgaaactataggcatgggctgccatgctcagctgacttttgtatttttttttgtaaagacagggtcttgctatgttgtccaggctggtctcaaactcctggcttcaagggatcccaagtactgggatgacaggcatgagccactgcgctccacctttatgttataattaatgcaccagcgttgatacattgtcgtgagctagagtcccatagcttattccgactgccttaatctttccctaatgtccttcttctgtccccggagtccatctagggtatcacgtgacatttaattgtcatgtccctttaggcttctcttgtcataacaatttctcagacttcccttgtttttgatgaccttgacggttttgaggagttctggtcaggtattttgtaggatatccctctattggaatttgttttttttttgtatgaccacattagggttataggtttgggggaagaagatctcagaggtaaaatgtcattttatcacagcgtatcaagtgtacttactgttaatgtgacttccaactgttgctgttgacattgatcacctagcctgagtagtatttgtgaagtttctccaccatcaagttgctattttttcctttttccacactgtactctttggcaagacgctgctgtgtgcagcctgcgcctgaggtgtgaggagttatctcccctcctttccactggagcatctatgtaaattatttggaatttttctgcatgagagatttgcctcttcattcctatccatttattcaatattttatttatatcagtacagactcacggatatttactttatttatactttgggttataatccaaggttgctttatttattttcttgctcaaattctgctaactttggccattgggagctctttcaactggctcctgcccccttccacagacccctatcagtgtagttttcttgaagtcctttcatattttctggcactacaagttgttccacattcaacttatatatttcctgctgcagtcttagaatcagccatttctctaaagagtcctggttctttttattagagaacggtataagaaaccaagatctgggtgccgggtgtgctcatggctgctggggtatcatttcttttagcccttttcagctgatggagcaaagaaatatctgtgtgtatactaacctgtgtataaacacacagttatcaatatttccatgtgtaactagttatattcatgtttagctaaacatgagtttatattgatgtctccagaatccattatatgtgatgaatttaatcaattaatttttttttaaatatagggtcttgctttcttactcaggctggagtgcagtggcatgatcacagctcaccgcagcctccaactcctaggctcaagcaatcctcccacctcagcctcctgaatagctagtactacaggcaagcactaccacatctggctgattttaaaatatttttgtagtgatggagtctcactatgttgcccaggctggtctctaactcctcgcctcaagtgatctttctgccttggcctcccaaagtcctgggattacaagtgtgagccactatgcctatcctataatatgatttgaaatagtggtgcaacactaaattcataaccttatttattactacctgaacacttattatctgacaagtactttctaagtgctcaccacacatgatctcctttggactgcatgacagctctagacactggttctctgttcatccccattttacagatgaggaaatgcagacacagataagctatatatcttgcccaaagtttctcttctaataagtggtgaagtagaattcaaacccaggttcagtcgtgtcaaacattaaaatgtatctatatttcacattaaatagaattcatatacagctaagagaaaaaggtcaccttatggttgactggttgacgtagtattataatcacagtatttcgcttcgatgttctgatttccctgggagccaataaatttgtgttttaattctcaaagttttctgcctgaggctgtgttgttgctaatggccagtggatgaaagagctcttaggctgttcccagtccgtccagctgccatgttgactcaccgtcagtccctccctccagctagcccccatgggaaattcacaaggaagcagggtcttctggggaaaatgtcccaggcagctcagatccccggagggtcaatgagggagggacaggatgtgtaaggggaggaagtggggggtgcgagaacggccttggtgctctgccccctaggtgttcccagtgtgaatctggtctgacctgctgtgcttcttctgcccgggcttcttgaaggaggcctaccctgaccccaagagtggcctctgggtgacccaaccaaaggcccctcctgcttcttctcacataaggtcccctcctctcaaacccaaggcccagcctcttccacctcctccaggaagccttctctgtctaccccactctcaataatatccttgttccccgaaataaatatcaatcctggaccaaacgtctcacactagcagccctcagatgtactttttaggcctgtatcatgttttctaaacttttaatttgactcccagcattgaaaagcaagagatttcacctaaaaatgtgaacacacaccctctcttacaaatgtggaaagcctggcatcccctggccctcgttccttctggtgagcccagccctgcgcctggcacacagcctgggtgcaccagccacagccttcttggagcactggcttcagaggcacgcaggcccgatttgcccttcctggccatgggacatggcaaaaaatgcttcttgtgcagcctcaatttccccatttggaaccagggcttaaaacaaaacctccttcatggggttgttgggaagaagaaatgaactaataggtggagcgggcttagcacgggccaggcattcagaagcctggattaatgatatttcgttttcttgttttcctttttgttttcttgctttggtatctctcatttcctcatggtcctatccttccccactcagtctgtctgttcgtccatccatctgccattctacaaatgcctactgtgttccgggcacatggaggatccagttgttcccctcggaaaacccctcttcctggtctgcctgagcagagagccatttcatccacacatgcattcattcactcattcattcaaatgctcactgaataccgactgtgtgccaggaattgttcggaacatcaaggaaacagcactgaacgaaacagacaaaaatctctgctgtcctggggctgatgttctactggtggcagacagaccataaaccaattataatgtgaggtagcactaagtgctgggaagaaaaatcacagatgtggcgggggcagctgcttggtcaggaaggcctctctatgagcagggagggggccgtgtggctggctccaggataagaacattccacgaagagggaaccagtgcaaaggccctgaggcgggtgcgggcctggagtgtttgggggcagagcgtgagtggaggggtgtgagttacgtatttccgtgatgttagaattcctctcctccctgtcattctcttccccctcctctgctttctctctctctctcattttttttaaaacaatgagtctcttaattttgttatcagatacacaaggacaattcataaaaatagaaataatatctgggaagcggtgggcatgccattggcacacaggagtggcgatggctattcttaccatttcttctcatttctggcaggaatgaatcacttacttccaacgtttcctaaagaggcaatgggctcctgggccctttctcactcgggagggcctttcctctgccccatcattctgagggtttctggaaggtgagtgcgtaagatgtgtgtgtctgtgtgtgtgtgtctgtgtctgtgtgtgtgtcttgccaaagaagggtgctgttgcctcttccccttcgctcccctcatctcctcttttctatcttctgcccctttggtggaaagaagcatccaagcgtggggagccttgtttcggggccactgagaacttgctgagctgagcttgctgaagcttacgatagcgaggccagggtgggatgtggctcattgtgtcagaaaagaggttcatagaactcttgagaatgggagtcctagaaatagggccctaggcccatctgaagtcttctcacttgtccccagagcttcaggctccttcctgtccccccaccttcctggatgctgcctggtctagccccatcatcctgcctgcgccattgcagtcacctcctgcctggggcccctgcttctgccctgggccaccctgcctgttcctcacacgcagccagaggaccctgccagaaccaactcagaccctgtcccacccctgctcagagccctcccagggatcccaccccactcagaggccctgtgaggtcctgcgaggccctgcgtgttggctcctatctcctctctgagctcacctctcccactcaccgccttgccctctgcccccttgcccagccacactggcctccctgctacgtgacaggctcctactctagcttttggaccctactgcacccctcccaccccagggacctctgcccctcctcttggggtcagctgggcagcctgccctgtactccctaaccccctccaaccccaggagtggggcttcttgatgccagcctccaagccctttatcacgtgtccatgggcagtgttctgaggtgtcagccctagaaaggttggctggatctgggtgcactgtggtgccccagtgcctggaacagtgttggctgcctggaacagtattggtgcacaatatgcagtaggcattcaattagtgcttgctgaatgagggagcctcagcgttttaaaatcagaccttgaaaacgttgcaaagttcttagaatcccaggcttgaagaattggagactgggaggcagtgaggctgggtgagtctggaaggctgcgggcccatctgccccatcctggtcggctgtgtgtgtgtctctctttttgaatctgtctctgtctttttctctctctgtcactgtctctttctgtctctgtcttgtttacctccttctcattgtttctctgtgtgttgtctgtctctgtttctgtctctctcttttctctgcctcttctctcctctcctctccccacagcttccttccctgcccccctcctcctttcttcctctcctgtctcctcccatcctctccccttctcctttcctctctctctttccactgttttttctcttcctttctccccactgtccctctctgtatctctcgtttctctgtctcggtcatccgtgtgtctctcctccttgctgtcatcttctgtccctgcctccatgggcacccagccagcttctgctgtggagcgtttttctgcctctctgtcctccatctgccccacccaggggccctatccaattgtcacaaaggctagcccatggccagtcctgtgaggggctggtgctgggcgtggaagctcttcttgaccttcttacttgtggcatgactcgaaaagttgcgaacctttctgctctctgagctctgatttccttgtctagccaaagagaataacaatttctggtacttccttgatttctatgctaagtacatttattatttcactggctcgtggtgaagcttggagaagtttatgggtggggaacctcaccaacaaaacctccatggcagcagaagcaggccttgccaggagctgaccatgtgctgacctgggctgggcatgttccctggctggggcatggccgctgtctgtcctgggctcagcacacagtggtctctttctgcccagccaggcctcctttcagaaacttgaactcattaggctgcctccagccacagggcctttgcaggggctgttccttctgtctgggatgctcttccttctatctttgacctggttaaactggggccttcttattcttctgatttgggctcaaacatcccctcttccaggaagccctccctgatgacacccccccaagtcaggtcaccttgttaaccactttctatcccttaccacagttataattatttatttgctctcagtccccacagggctccccaccccatcttctgggcttaaggctccccaggagggaagttgagaggtccaggcccatgagtcagcagagcttggcttcccctcttagcactttctttggggcggttggggcctggcctcctccaagggggactaaattcaggggtgactaggtggtggggaggtggccaagtcctctctccgccccctaccccagctgcccagcatcagacaacttctctctgcttctgtgccaacacctgcctgagccactgttgacacactcacctcccccaccccagctccattgccaccttctcctggggaagccagagggagcttttcataatctaaatctgacctccaacggccgtgctccaaacccttccatggctccccgttactctctgaataaagccccagcccctcagccggcctccacgccctctgtggcctggcctggcctcttccccttcatgtcccagcagcccccagctcccagcagctccctgcccccaggtcttcgtgcttgttgtcccaccaaatggatgaaagccacctgttcactccctcacctccttcaagcccagacatcaccttcctagcgaggccttccctgacagcgcttcttaaaattgcagactccccaccatctttcccctgcttccctcctttatttctccctagaaccccagcctctgggaataggccatagagtttatggattcattttgtttttcgtctgtctcccagactagaatgtcagttccccacgggcaggtgccattgtttctcctcttccttactgtgtcctaaggaaggagtgagcgaggcctgtgtggctgtggggtcagatgggcttgggttcaagttctggctcattcactgcctcactttctctccttaagagctgagtaaactcttgtgtgtaaagtgtctagtgcctacacgtgtctagaggaaaaaaagccaaaatgagaactcgtcactcatgatttcggggagatgggtgatgctgcttaggcctggccacaccctggtgttgttacccggccattgaaaagtatgacccgcagccctcccaggacccttctgtttcgtttgtttgcttttaagtattatttgttacacaagcatttttttccctctagattttatttttaatgaaaaaattcaagggaaattagtgtatgtaatattccacccttgttttaaacaggaggtggaagatacatgtgtatgtttttaaattgaggaaaaattcacataacataaaagtaaccatttaaatgaaccattggccattttaaagtgaacaattcagtggcatttagttcattcataatgtagtacaaccatcacctctatctagttccaaaacattttgtcccctcccctcccctcccctcccctcccctcccctcatctctcctctcctccccttcccttcccttcttttttattttccagtctcattctgttgcccaggctggagtacagtggtgtgatctcagcttagggcagcctcaacctccccaggctcaggtgatcctcccacctcagcctcctagatagctgggactaaatgcacatgctgccacgcccagctaattttttgtattttttgtagaggtgcggttttgtcatgctgcccaggctggtctcaaactcctgggctcaagtgatctgcctgcctcggcctcccaaagtgctgggattacaggcatgagtcactgtgctaggccccaaaacattttcaatcacccaaaggagaccatgtacccattaaacagtcactcctcattcctgcctccccccagttcctggcaaccgtcagtcttctttctgtctctatgggtttatctatactggagacttcatataaacagtatcatacaatatatgaccttttgtgtctaacttctttcaattagcctaatgtttttgaggttcttccacgttgtggcatgcatcagtacttcatttttttttaatttttaattttaatttttttgagatggagtctcactctgtcgcccaggctggagtgcagtgggatgatctcagctcactgcaacctccatctcccgggttcaagtgattctcctgcctcagcctcccgagtagctgggattacaggcatgtgccaccacgtctagctaatttttgtatttttagtagagacggggtttcaccatgttggccaggctggtctcgaactcctgacctcgggtgatcacctgccctgacctcccaaagtactgggattacgggcgtgagccactgcgccccaccagtacttcatttttaaaaaatgatcaaatactgttgtatggctagatcacattttgcatatctattcatcgactgatggacagttgggttgtttccaccttttggctactgtgactagtgctgctatggtaattggtatacaagggcttgtttcgtgtgtgtgtgtgtgtgtgtgtgtgtgtatgtgtgtgtatatatatatatatttttttttttttttttttgagagactgtctcgctctgtcacccaggctggagtgcagtggcatgatctcggctcactgcaacctctgcctcccgggttcaagcgattcctgtgcctcagcctcctgaatagctgggattacagacgtgcgacaccatgcccagctaatttttgtatttttggtagaggactgggtttcaccatgttggccaggctggtctcaagcttctggccacaagtgatccgcccacctcagcctcccaaaatgctgggattacaggtatgggccaccgctcctggccttgtgtgggtattcttgagtgaaaaatacaagatgcagaaaaggatgcccaatgtgattctgatttgtaaaaggaatgacagataaagaaaccctttgtccgggcagacagtctgtatgggattttcattcttacagaaaaataggtaagaatccattctcaatggtcaccaagggaaaaaaagaaggcttttgcagaaaagtaaaaatgaaaaaccacaacagtgcacacacagtggctccatgcgggcatgtgagacacactagactgagtgattgtatgtgcagatgtgaaaaaaacagcaaacaacaaaatcagccccgaaactagtctctctaggaggggctgggcaggagcctggtcagatggagaaactgaagttgggaagaggggagggaactcctaggagagagtgatctccaaaaactgctccccacccctcctttttaactccctccccaaataccaggtcccattggagccaaatttcctcagtgttttggaatctcagacccgcaggcaggagacagattcttccccatggaggatgcggttgggtttttaagctcctgtagattgagcacttactacctgctaagtgtttcacctaccttatggcctgagtcctctcccagcccctgaggaaaagctattgttcccttatttatttattgttattgttactttttatttatttacttattttttagatggagtcccgctctgttgcccatgctggagtgcagtgtcgcgatctgggttcgctgcaacctccgcctcccaggttcaagtgattctcctgcctcagcctcctgagtagctacgattacaggtgcccaccaccacgcctggctaattttgtctttttagcagagacagcgtttcaccatgttggtcaggctggtctcaaactcctgacctcaagtgatcttcccacctcggcctcccaaagtgctgggattacaggcgtgagctgccgtgctcagctgctcccccatttttttcgttcaggaaagcaaagttcagagaggagtaggtttctgtgcagggcgtgtggcagagctggacttgaactcagggcggaatccttagccatggtgccccctgccacatggttcggctttccttcatctctgctccccaagatgcctggctccagctgaagatccagggttcccaggttcctcttctggggacaggtcctccttcagcctgacctgagctctgccacttccaccggcatgaactgtagcaacaatttggctacccgggcctcattctctccatctggaaaatgggcacagcatgtgcctttctgcacagtgaggtcatgaaggattgatgaggcaacacgcaaggagcgtaagcctagggcctggcacccaggaggccaccccagtgggccctgctgggtttccgatttcccctgtgacacctcctgggggccggatccccagcgggaggagggatgaggcctggggggcctggctctggcacaatgcagagcattgagctcatgccagccttggctttgggtttggacaaatacagtaatctgggcaggactcacacaaagacctgggggccaggtcaggcgaggggcgtcaggttacccctgtgggctgcagccacacaggcggcttggggggtgtattttttttccctaaagattatcattaaatgagccctcaccgaggcctcagcaggcaggtttcattacaggaaaaactgaggtataggggtttgcaggcctaacgggacacgctgtcactgtgataggaacagcattagcaataataacagctgtccttccggactggttcccaagggctaggccctaggtgaataataagccttttctcgatcctttctgcagcccgagaggaaagccccatgctatccccatttcatagatgggaaaactgaggcttgaggacactttgcggcctccaagggctgttctcttcattcctccagcagagtggatatgagacggtgcagggtctggaatgtctgggcagaaggaagagctggagcaaaggcctggaggctggagagcgctgtcggggggcaagtggggcagtgtcccactgcggggtttcatctcagctctgccatgtcttggctacgtgacctctgacaccctactgggcctctttgatcccagactcacctgtagaatgggtgtgtgagaagaaaaccttctggagcggggtgttgaggagagaacagtgcctgacacatcataataataatgctgaatagatgttattttcattcctaaccacttcctccaggaagcccatcctgacctctagctcccaaagtcacctggacttcctccatcacagaccttgccacagtgtgagaaactgcctcatccacacaccagcttctcacctccacccagaccctctgattgggactcccctgaagactgtgtccccagagcccagaaagagtccagcacagagcagctgagggggcaggtgctggtgaacagtgtcaatgagcccctgctactcaccaagcccttcacacacgggtccttcatttaatgtctttcttctcctagatagaaccttggctttgccaagaccggtatagttgctgctcaagaaatatgtgaggaaattgttgagatgaaccagcactcaggggaagggaggctttctgaggctggggccttagcaggtggagctcctgggataataataataagaaagatgcctggacgcggtgactcacacctggaatcccagcaatttgggaggctaaggcaggcagatcacttcaggccaggagttcaagaccagcctggtcaacatggtgaaacctggtctctactaaaaatacaaaaaattagctgggcctggtggtgtgagcctatagtcctagcttctcgggaggctgaggctggagggtcaatgattgaacctgggaggtggagcttgtagtgagccgagatcgcgccactgccactgcactccaggctgggcaacacagtgagactctgcctccaaaaagaaagacaacaataatcattagtctttactctgctccaggcaccaggctgagtcttctcagttcatctccccagcagattagttctattattgtttccatttcacagatgggaaaatcaaggcacagggaggggaggtggcttactccaggtcacacagttagtgagaggcagaggcaggatcaaagccaagcctgtttgactgaggagcccgccccgagaccttaaccacacaacccctccctagaaggaaggtgccactactggacacattttggagatggaaaccaaggctaagagagtcaggatggcctgcccatgtctggacacagaaactgaggttaagcaggagatgcccgaggcggggtccctgtctcctaggccagcaccctgaagaaggggtgggagacaaccccccaccccccaagctgtcccctgcttgttggagtttctggtcaataccctggcctctgttacccagcccagcacccaagacgctgcctcttccgcctgcctggagtctcgggtgccttcacaatcggattctctgtctctgcagctgctttccatttgagccctttgtgctgaaaataaaaaaaatgaaaagaaaacttggcaccacccctctgctttgcttcctggggaggaaggaggatcccagctacttctttccctcattctggggcccagagatacccacagcctgcccgaggtcacacagcagggttggagccgggaccctggccttagactccccttccagtgctctacccactctggccactgcctctgatgttcctggctcttcctctaggcccgtgaggagcagagaaattaggatgaatgttcccgagccctaccacatgctgggcactctgccatcctgggctcacgaaaccctcatgacagccctgtgaggtcccgtcatcccatttaaccaacaaggaagctgaggctcagagaggggaagcgcccaaggtcacacagctgggatgtggcagagctggggttccagctcctgttcccattgctggacagctgccacatctggcacccaatttaggaccccgcggggaggcccaagccccgggggtggcgggggatcctagaggaaagtggcaaggccaggaccctggagcagagccaggtaggaacaatgggttctcagagaccaaggtggcagggcggggcggctgctgagcaggggcggcagggcgaggtggcgggcggggcccaggagacttcatgctcccgcctcctactccagctccctgtttgggatctggggacgctccaagcacctcagcttctcaacctggacagacccacggctccagcaggaggcagggccagccctgtgtataaccataaatataatgggcaataatcagatttcacgcttaccgagccctactacaggccagacactgggtcaagggtccttcctgggtcatcacaatcagcctaggaggtgcaattaggattagtggctttttacagatgcggaaacagaggtccagggagctactcagcacctgctgtgccaggacaaagaactttgggaagtggggccctcagagggtgggtaccctgttcccagaggcaggaaagttgaggtggactggactcagtggggctcagtgggacaccgtggggagtcagtgctctctgggggcgagatgaattagagggagcccttttggttttttagaatctgaacatggggcgggggaagcagagatgtggggagcagatgaagcctccctggcactgctgggaggattaaaggacttgatggacacccagggcttggaaatgtacctggtagagagtaggtgctcagggaacaactcctgtttgcagaaacagcaactcacacttagggagcctgctgtgcatctgaaccccgtgcttgggtgtttctgacccccttccagctctcatccctcctctctccattttctcccctgtctcaggttcattcctatgtttcctcttgccccaattaggccatcttctatgactgcaacagtaaaaatattaattaaatcttataacatgaagtctaacgtggggccattccagtgttccagggcaggctccctgcgctctaggtaggcatctcttcacttctctttcttcatgggccccagtgcctgctgtggctcaagacatcacgtcccacatgatcacatcctaactaggaagagatgaacagaaaaggggactttctcctccaggatctcacttttttttttttttttttttttgagacagagtcttgctctgttgcccaggctggagtgcaatggcacgatctcggcttactgcaacctccgcctcctgggttcaagcgattctcctacctcagcctcccacatagctgggattacaggcgtgggccaccactcccagctaattttttgtatttttagtagagatgaattttcaccatgttggccaggctggtctcaaactcctgacttcaggtgatccacccacctcagcctcccaaaagtgctaggattacaggcgtgagccaccgtgcccagccaacaatttttcttacatgtcccagtggatgtcccctggtgtctcatggaatgatgggctcacatgtccacatttgaaccagaaaggaattcccgtggctgactcaggccaattagggttcagcctgtctggctgctccaaagagatgtgggctccgaaggtgatgggggcacggctgggctggccaccagctggagtctcactgacggcctaagtggcacagtgggcctgggtttgctcggccttctctggctggtcctcttggcagcgtctgccccctgggtaactgccccctccttgagcacagtcttccccagcctcttgatggcggcttgctggtctcgctggttctcctcttacttccctgcccgttcctccttgggccttgaaaacgacccctctcctgccttcatctgacccttgccccgtgagctcagctgtgcggggtccctcgtgcctttatgcgggctctgtcagtctgtccatgggtgtcccaggggcgcaccccactgggagacatggatgtctttcccagctgagaagacagcactgccacccacccagtgggccaggcctcagaccccagagttgtccttaactcctctctctctaaccccaacattcaatcctcagcaaattccatcggctctgcctgtggactgaatccagaactcgacaagtcttccctcctctgtctggtcattgctcgcctgcctgggcagaatctccgccctggactccccacccaccccacacagccctccacactcagccagagggctcctgttggaacccaagtcaggtcacaccattgcctcactccaaaccctactcctacctccctcagagagaaagacagtccctgctctggtcccaaggacagccctgcatggccttccccctccccacctcccctcccctcttccctgcccgcagtgacctccctcctcctgctagaacacatagagctttgccccacctctcctgggtgctctttttctggatctttccatgatcagccccatcccctcactcgggcctgtgcacctcagagaggcctcccagaccatccctgaaagtagccctgcccacccctaccacacctgccaaaggtcagcttcggcaagtggggactgtgtcttattcagcatggggccagcacagggcagtgcgcagaacgcagcagctggcgccgggctccgtgggtcctcccacagatgcagtccatagggatggtgtctgggtcccaaggtgacccctgggctgaggtcaccacctttcctcttccaggatcactgcctggatgacggtgggtgtcccagtggtggggagagcagctccgagcctccatcatgcccagagcaatgggcactggagcctggaaccttctttccgtatcacagaacctccaggagtctggaaggagacagttgcaaggaatggaatttaggaacttttggtccatgctcggtgttccctttgggggtatcttgtccgatggttattgtttttgtttccccttttcctgagctgtggtgcctattgttcaaacagaggaccccaagcgatggcctgcctcactcaggcgcaagcacccgagctgtctggcaaggtggcaatccaccacggccaacttccccttggggattccgcaggaaggacgtggcccctccaaccgaggcggatgtacggtctctccatagattccgcctgcgtaatcccatggccgcttcagctgggtctcatggggccaccctgtggcctgcgttcaaggaccacatcgtagcaacaggtctgcgttaaagctggaatcgcacccagcagactcggcctggggggatccaccagcccacatctcgctctcccgatacagccacctggcaattggctcttctctctccaaggctgtatttgttctttttgctgagtgtgtgcaggtgaattctcgttagttaaagcgcctgcgcggtggccgccctgaatacaaaaaagatcaaggggatgctgtcctggtaggtataaggagtgggggccccccacctttaccacttctccaggtgacccgagggtctgtccttagaataccaccaggctcagtggaacccagtttgaaagcccacgatcgaggtctgtccctttggtctccatctgggaaagtgaggcgagagatgagggagggggcattttgaggaccagaaatgtcgtggcagaaacagccagcctggagaagggagtctgggcagggcaggacccaaaggctcgagcaggatgtgtctggtgaggttgtctgggggaagtgacttgcctgtccccttcgttcattcttcaacattcattcattcattcattcattcaacacacaatgaagcacccactgagctgggggtgacaatgatccctgcctacaagaagctcccaggccggtgggggacatgaacacccttcaaaatgtcaatttgtggctgtgacaagtacaaggtgatctgagggtcagtaaagggggaaggaggttgatgtggttagggtgttcgggaaagcttcctagaagctgagctgggaactgaagggtgagtagaggccaggcagatgagaaagggaggaacgaatattccagcaagtggacacagcacatgcaagggccctgctgtgaaatggagcagagtaggagaggctaataggctcgcagctccacgtggcggacagttcgcagtgaggggcagatgtggagaggaaggtgaggtgggggctggacaggctcccagtgaaagcagcccagtctctatgccaaaggcagaggggttcttgggaggatctgagccagcagcaccagcttcttcctgaatactccagggcttggggccaggggtggtcatctggactcgatcctcagtgggataggagacagggtcacctggcacttccgcccacctctgccttcctggtctgggtataacaatcactgtctcttcgtctttcatgatttatctcactgaacccccacccacagaccaacacctgcaggtgccaggggttgaacccacttgtcagatggggaaactgagtctgtgagatgttctcatggccccacccacttccttctgctcagagaaaagaggaacggggaactgatgcccctggtcagctgggaagagtctgggcagggaatggggagggtggggccctcgggggcctgcattcgggatgggcaggggccctgcttccgtttaaccacagccctgtgacatgccccaaaagggaagcagcagccgcctgtcctcacccctccgtgccctagggagggggctggggatgcccaggggtggggagcaggagtctggggaggcctcaccctcccaccccaggcctcgagtctgggttcttacagaactctggggtcagctgaacccagctggtgacctccatcaagtcccaagaagaccttggcttcctattctgtaaatggaggatcagtctctctggaatgttctcagattagcacacagtgggtcctcactgaatggctagccagcagttgttggttgaataagctaaaagtgtttttctccctgaaaggagtagccaattagataaggaacccatgtatatgacattccacaaatatttattgagcacctattagatttcaggcattgtcctggtactgtggagcaatgaacaaacaagacaaaaatgcccccgtcacctttggagcccacatctctttggagctgccctgcctttcctggtttgtggcagacatcactaattgatcatctttcctgctgcaaccagaattctctccaacaccgtgcaccactcagagactgacatatggtggggaacagcctgtcatccccagggagggatggcacgtggggacttggaaggtctcagtgagaatcttctagctgatttaagcagcttcctctcagtctctttcaacaaatatttattgagcacctactttgtgtccagtactgtgccaggcattggggatacagcagtgaccagggtggacattacccttaccctcgtggagctgatgttctggtgagaaagacaagtaaacaaataagcagacacttccagacacagatactacaaacacatgccagaggcatatggtggagggtgacagggaaggagtctggggtaggttggggttgggggttctggagggagggtatttattgagacctcactgagatgcagccaccaaaggaaaatatgggggaaggtgtcacaggcagcacagcaaaggcataggcccggagtggggaatgaggttgatagatttaagggacaggaaggaaatagtgttgctggcggggcatgaatgtaggggagagaagcaggagagggtggtggagaccaggctggggccatacatccagggctcggggccaggggtgggctctgaatcacatctccaatgggatgggcagtcactggagggtcaaagcagggaagagacttgggcgggatcccatttcagatccctctggctgtgtgaagcagggacacccagccggagatggccgcagatgtccaggcgagcgaggatggcaacttggacgggggcgatgccagtgaatgtggggagagatggccaggcctggcgggaggcccagggctctgcattcagtttcatttttccttttacacaatcccccccggccccgggcactctgggtcactggactttccctggcactgccggtggggcccacaacctgctggcaatctggcctctccgagtcccagctggttccctgccctgtcctggacccttcctctccaggaacaggcccagctccagttcctctgtcactgtttcccaccacctcctgccccaggtctgcctgggccctgctgatctcctaattctgcctctgctccagcaccccctgctccagccctgctggctgcctgggagccggcagatgcttcctctgagctgccttttccagatcaagtttgcatccaaggaagcgagcctgagactcccagccagctgggggagacaagttcgagggaagtaccccaaggtagcttgccagagggcagcctcgctcttgggcagatttttcctctggtccagtttgttgttggatggagcaggcagatctaccttccccactgactcaggccttgggtgctcggatggagactgtggccgaagagctgtgttgagcagggctctgaggctgcatctatgatactaggaaggagactcattattgattagtgatgcctgctgtggacccaggatggaggataggggccacgctggcctcataggtgtgtctgcggcacccagtaggtcctcaggtctgcactcccctgttgtacctctaaatcttcaagtataacaaatgctgtttgaaaataccttatgatggtgggccgaggtgggaggatcgcttgaggccgggagttccagaccaggctgggcaacagagtgagaacccatctctagaggggaaaaaaaaagaactagctgagtgtagtggtgcacgcctgtagtcccagttacttgagaggctgaggtgggagaattgcttgagcccaggagattgaggctgaagtgggctatgactgtgccactccactccagcctgggcaacagggcaagaccccccatctgtcttaaaaaaaaaaaaaggagaaaaagagagagagaaaataccccatggccttggtttccttatctgtgaaatggggatgatgatgacaagcccccagagggcttccccgcaccctggcagtgactgacacagaggccctgagagctgcgtgttccagagtcatgcagctggtacatggccgagctggtggggtttgaaccctgggtgcctgagtcagggagaacaggcggaacagttgggccagggaggggaaggtgctgcccagagctcccagtgaccttggaccccacttctcctttctgcccagtgtgctcggcacacaggaagcctggcggggcctcccttgcccatcctgtctgcagccgggtggacacggggtcccggcgtcacccaccgccacccaggcctcctccttcctgtgttgtgcaagacgaggcgtcccctgtgtggaatgggcaggcagctctggcgatgggtggacgggtgaatgggggcctctcaggcggggtcactgcccgcggttacctctagcaggcctggcctaagcctccgccccttcctcctccttctcctcctcctctgtttccccaaagttcaggcagccttaagcaagaggctgtgggacccaggaaactggggaggttgtccagccaccatcttgtccccacagagcagacctaggcttgcgcagtcttggagaggtcctaaacaacaacaacaacaaaactataataataatgataatagctgttatagtggagtggcttctatgcaccaggcatgctctcatttaaccacaaatacataaaacgcacctcctatgtgccacgtgtgattctcagacctttacctcatgtcccatcgaatccccggcaacccttgtgaaacagttttttttttgtttttttttaatgattcctttcttcagagtagaaaactgaggctctgagagatgaagctacttgccaaggtcacgcagcacagtcacatcctactgaacatcatcctgttctctggggtgagtgctgtcctggaagttggggggctcagaagctgttggtgcccacctgggaggtcgcccttgcagctgctatcctgaatctcttgcccaagggcttcctctggccacaagagtgtgggaagcaagtgagagacccctgccagtagaggtggggtctgtttgtccccccactcagcttccttgcttctggctcaggggacagtgggaaggtactttctgcgagttgtcccagaggcctctagggggttgggctcctgttgcccactgaggagacctgctcatctaccttccttgtgtcacttcctcactccttcccagtgtttctagaatcacctcccaaatatcccacttgcacccaaaaccttgtcttgggtcagcttctgggagccgacctaagccagcagctataatgctcagggcttaagagctttggaatcagatggacctgagtgtgaatcccgcccctgccacttaacctgagtgtgaacttgggagcctgccccacctctcggaacctcagttcctccatctatgaaaagggaacttacgtgcagaaaaccaagtgactatgagggggatggggcagtgtgagatgacgggaccagagcacgttcctggctgcagaggccacaagtcacgctgtctctgagaggtatggggacaggggcgcagaggaagaatgatcgcgagtcctcagccctgtttggctgacgggggacagggatgggtgggaaagaggtacagcgtttttccaccttccccacccatcacccctgagattccaaatgaacatcgggaccaaccccgggagcccagcggatgttcagggtagggcaaagaacaggtgccaagtttgctccctggggtgtgagactgggcagcctcaagagctgcattggtaggactttcaccaggtagacagcaggcacctcgcccctgcagatcacagcttccagggccacctgtccacagaatcccttcactgatctgtgcttgaggcaggggtgtgtggactgggagtccttcttttactctgggtggggcctcatgctcagagggagctctgtctacccccaccacaaacctgcagtttccctgctacagcgatggcaacctcagccacctggctgcccaggcccccaacctgggttctccctcttgttcccatggtcagcccatcagcaaactcatccacatgtccaagggtccacccccactaccctgccctgccctggtccagctaggatgtttgcagtcgtctcctcattggtctccctgcctcctctctcgccttcctaagccagaggaattctgtaagagctcaagttagatcctatcccttctctgctcagaaccctctatggctcccaactcactcagagcagaagcccacagggcctgcaggatctctgccctggccccgcctgacctcactgcctctcccttctctgttcacccacagccacggtggcctcatctctctgccataaacttgccaattatcctgctgctgcctcattgacttcgcacccactcttccctctggaacagaggacactctcgccagctctccccatggcggatccttgtctagggtcaggcctctgctccaaagtcacccctggggacaccttctctgaccagcccctcattcctatggcctcatgctgtttttatttcttcctaggacttagcacgtatcctagaaattaacctgctggtatatcctgtttcttgtctgtctctttccagtggaatgtcaccatcgcccaggtggggatttttgtgtgttttgttcactgctgtacacccagcccccagcacagcgcctgtccaggacaagtgcccagtaaacacttgggaagcaatgcaagcgtgcgtgcatggataagtatttctttggcagatgagggggctaaggttcagagaaggccctgggggtctcagactcatagcccagtgctctttctgctgacacgccctggtctctggggcagtttgttgcctgttcagcaacaaagagggtgtgcctcgttaggggtcctgcgtgcgaatcgcagtccctgcgtgtcttggctggaggtcaccaccctctctgctccagggcctgtaattaccacttaccctggtcaatgggtccgagagattacccttgtaggcagggctgtggccagggtgctcacctggcccccagcaggtcccatgggcactgtctggccgggcttcatggctgacattccaggtacatttctagccctgggctgccatgggcagagggtggggagagggtcgtgggcttcaggctggacaaaccagtcagccttcccagctgggccgcctgaccacccacttcctgtggggctccttgaggcctggagggtggagggggtctctgttcaacccccacccatgccctcttcccttctctccctcggcaggtcctcccagcagctcctgcaaacagacccccgacccaagcccttccttctgcctccactgccaccactgctgctcatctctgctggcacagaagtctcttccctggtcttccagaaatcccctctccacactcagccagagggagctattaaaactgtgggccagcccacatcagtccacagcaaagtcctctctaagggatctctgttgcttggagaataaaccctcggattccttccttggctctcggggcctcctctctgacctccctctgtctcctctcccagccttcctcctcactcaccctccagccatgctggcttcctccttgctcctgaaacagcctgaggcccacactgccccgggccctttgcactggctgtttcctctgcctggaacacttctcctaggcatccacagggctccctcccacaactccttcgggtgcccacatgggaagccatccctgaccacccccccgacttccttctgagcaaggtagggtctttctacctagtcatgagggcagggatttttgtctgttgtgttctctgtgtgcccccagtgccatcccagtgcctggcagatggtaagtgctcgacacacattggctgactgcctgaatgaacaactctatgagccgatggcagataaggacactgaggtcctctggggtaggtgaccagcccaaggccacacagctggtctgagattaggccaggagaggagcccgggttggtcacatcctggagttggcgtcttggaaactgcatcaggagaataacaaagatgagacgcaggctctaacaagtggataccagtgactctcgccccgccagccccagccctgcagccttgggcccttccaggagtcatggtctgcctgcctggggcattccaggcttcgacccaggtcctgcactttctattttgagcctcttagtcctgaggactgtgtgttcccagcaggcggcgcgggccagaggctgagcctgggtgtggctgtcaccctatctggggccagagacccagattcccgggcccttaacctgttggctgctgagggctctggcataagccctgttccctgcttgattgtctccccttcaagcccctgccctggtatcgtatcggcccatctcaccttggattatatccctgtttggccccatttgaatcctggctctgcccctttccagcaatgtgaccttgggcaagtcacttcatctctctgggtctcagtttcttcatctgggaaatggggacaataagagtacctgtctctggccatgtgtggtgactcatgcctgtaaccccagcgctttgggaagccgaggcgagagaattgcttgagaccaggagtttgagatcagccctgggcaacatagtgagacccctgtctctacaaaattctaaaaaaattagccgggtgtggtggtgtgtgcctgtagtcccagctattctagaggctgaggcgggaggattgcttgagcccaggagtttgaggctgcagtgagctatgattatgcccctgcacatcagcctgggtgatagattgaggccccatctctaaaaataacaatactaataataaataaaaatgaaaatgagtacctgtcttctggggttgcagaggagattcaatgtgatgaaattgatgagagtgccctgcagggagccggaaactcagggagcatcgataatgagtcccccaccatcagcagctggcttaaatataaaaactgtcatggcctctggagaaatgacaagaattcgaaggagcttccctgcactggccaccctacaccctacacccttacttcctcccctcaacttgcctggatttatcgacccccactaccccactggttgccttctctccacctggcacatttcgtatgaatttgcttgttggttcttgcctatctccccagtagaacattagctccttcaggacagggacttttgtctaccttatgcacctagtgcaatgcctggcacacagtcggtgcttaataaatgtttcttaaaagaaccaataaatgaatagtgacctctccggggagaggagccctgagctcacctcctgcccccagcccagggctcttaggtgcttgttggtgtcaggcccaggcccccctctcatcaagcagccaataaaactgccctggttggcgttctcatttcacagatggagagactgagcccagagagggagagtcacctgtctgatgtcacacagaggtcagcatctgggctgggattccagcccaggaccatgtggggtggggggcagtggatcaatcttttcctggagggagtcaatggtgatggtgggaatgggtcaggggtgctggcaaggagggtccaaggcccccaggagggagggaggcatgggagatgagtttgtccctcttgagttctgtctctctctgtgtctctctgtttctgcctctttctgtctccttgtatttctcagtccctgtcttcgtctatacctctttctctcttccttgtgtatctgacccactgcccaggaggggatgcaggcagagacccctggcttgggtcctggagttggggcccacgaggggattgacatctggggttgagctgggaatctgaagccagaccctgcagccagggacagcattccagtctcggctccacactccagggatagccttggaacgccaggcagttcagagagcctgaggtctggtcttggagacctgggttccaatcccagctttgccacattccagccatgtggccttgggcccttagcctttgttcctgtaaaatgggaccactgagagcccgatctcagggttttatgaggaggaacgatgagagggctgtgctgggcttcctgaagccctgtgtggcctggaaagcactcaatagatgataactcagtgtaatgatttcttctagcagatggggaaagcgagagttaaagaggcccgatcatttcactcactcattcctcaaacgttattaagcacctgctatgcaccaggtgctttgttttgtatccattaactcagggttcagcaaactacagcctccaggccaaatctggttcacagcctgtttttataaataaagttttattggcacacagtatgcccattcatttacatattgtccacagctgcctttaccctacaactgcaatgttgagcagttgtgagagagaccttaaaacccacaaagctgaacatatgaactctctggacatttacagtaaagtttgctaatccctggattagcccattacaaccctggaggaaggacatgtcataagcttgattttatggattaggaactgaggtccgagcgcagtgtctgccacaaggttgggtctccatacgtaatatctgggtcttattcctcctcttctgccccatggggagctgccaactcctgttccctttccctatcctgcatggatcataagtggataatttgaatcccgcagaggaaggaatgctgtttgaaggtcaggtcaatggaaagagtcctattttcaggtcaatttggaccttgccaaagcctcttccttctggtgaccttagctgagaggtctgccactagcaggtgcttcatgaacagttgctgaacaagtggtgtgcatcatgctcccgctgtgaacttcagcttgcttgaaggcggattcctccaggtaattgcaggagaccccacggccggccacacaccaccgttgggatgaaagatggcctcgagccatcggtgggagaacaccctgggcagggagatgctttctagagctccacggaagtgggggaggggatctcactgcccgccaagcatgccctggagtctttgtcccttcctccctcatgctggaggcctgcaggtacctggcttgagacgttgcctggccctcaaaacacccaggttccccccaagctcctccccagcctcctccctgctgaccttggggagctcccggtttgccctcagcccttttctggaggccccagaatcaccaagaggtaatcctgcctgctgcctggaggaggcgatgtgggagactcaggaacctggggtgtcccccagccagggggcgggcgttgtgatccggcgctgctgagcactgcagtgccttccctgatggccttgtgtgccgctccctgaccctcccgtagagcagccttcccatactgctgggtgacacttgcgtaaatcatttcacctcttggctctgtaaaacgggactggggtggtccctaccccttcagggtgtcgtgagaatgaaaggcatcaagtgggcaaagcgcttggcatggccctgaaccatggtgggcatttgtcacacacgctcatggacttattcctgggtccctaggataccctggagctcctccccaggttggacctgctgctagcatgagagggaagaagggggacacagacaccaaagacagttctcgtcctcatctaaatgctggcgacttccaagggcacctccccaaggcctcccctgagcctagactcaggggtctccacccacctgtctctgtccctgctgggatgaccaggagaagcctcaaacccaggttggccaggactccattcctgatctgccccccgaagccagtcctgcctctactgatggctcctgcatcctccaggtggtcccccaaacctgggagtctcccctgccttcttcttctcacttgctcccacatctgatcgctcatcacatcctgtcgactccaccttcaaggtagacccggagtctgccctcgtctccccacctccacggcccccgcttcggccacggccaccagcaccaccgcctggactggtgcagtcacttcctcctggcttccttttctccctcagcccctcacagtctgttctccacacacgaccagagggacctgtcagaagggacctataccttccagcacagaccctcccagggatcccagctctctgagtgaaagctccctgtggcccgtgaggccgggtgcgaccctggccccccagcaaaccctccacttgtctgatgacctcgctgcctctctccctcgcgtactcccttccagccctgatagcttcctgctgttcctcaagaagccctgggtctttccacctcaaggtctttgcaggtccctggagcccttgtccaccatggatgtccacggctccctcacctccttcaggtctgagctcggatgccactctcgacagccaccttctctgacccttcccctggcttaagtagcctctgcctgctcgacaatctctccctctacgcccctgaccatcccgtgttcttttttcatagggggaggggaaaggcactcccaggagagtggacagtgtgggccagggcctggacgtgtgggcagcaagagggtgggtgaggggagagtggtggagcctgggtggctgagcttcagggggaggcatcctccaggcaggagtgagcaggccagggtcaccctgactccgtcagccactggttgtgtgacttcagggagctctctctggacccaagaacctgcaactgctgttggagacccactaagtggacctgtcatctgacagagggggaaactgagtctccaaagctgctgctgtgacctgctgaaagggtcagcccagggatagggacaaaccaggggcttctagcagtcacttgcacctcagtgtgagtgagctccctggattcttggctgtctggtagcccctagaccccatggggcttgggaggcagagtgatggcagggctgagcctggggtggagtcagggctgtgtcaagtcccggcccagcctctgtcccggcccctggctccctgcagggtgctggattgcacaatcataccacccacagctgtgaccaaggcaggtgacacacgctttctgggagccacccttgggccgtgcagcctcgtcacacacacagggccaccgatggcatggatgcaccccggcacatcctgactgcgaggagtgactgctcctcacactgccacttccgggctgtgtgactctgggcaagtcacttcccctctctgagcctcttttcctcttctgtaagaggaggtaatatagtgcctgctcccctggctgttggagggattgactctgcccccgccatgctggccctctggctggtcctcaaatgcaccgggcatgccccacccagggcctccacctgcgcccttccctttgcttgggccggcccttgcacctccttcaagtctctgctcaaacgtcgcagctcatgaggcctttcctgcccctgacactccctccttactgaattcctccctgcatctctcagtgctacctgactcatcatggttcctgcttgttttgtctacccgctcctgggtggcagctccatctttgtctctcttggtcatcactgtgtccccagatcccaacaaagcacctcgtacaagaaagtgctcagtccatagttgcagaataaatgaatgaatgaatgaatgaatgaatgaatggaaagtgcttagctccacgcccgacccttagtaagcacctgaaacccaatgccgtgtggtggtgttagctttggctcccgatttctagccccatccaatcccaccctcatcagcccggcgcccgtgctttctctgcctggccagcttcctgctgcctgcacagtctcctccctgggtcaggacgacctctgagggaatcgtgggcctgcacggctggctccctctggctctgcctccagctcctcttacatctcccgggggcagaggcttctgggaaacaggctttgaagctcccctgggtcagacccgctggggccttccttaggcattgcctgatgtgaccccattagtgaacaaatggggacagtgagacctagagaggggcagccatgtccgatgtcaggcttcggggctcccaaaacatccagggaagcttccaggactctggcttctttgttgtttttggaacagagctgagctcaggtgcctgttttctagatgacaaaactgaaccccgttacaggctttggagccaggtttgaatctcagtcctcttacttcctggctgtgtgatcgaggtttgtcacttggtccctctgaggctcagcttccttgtctgcaaaatggcaccctaatggtacccaactcacggaggtgtttggggggacaaggtcagccatcctgcaggcaggtggggtctctggcctctcccacggggtcctgggactcctggctccggaacccccaaggcccagcccctccagggcccgcatggttccctccttgctgggataatttacagtcccagggccatagctgctgttgctttatttttttcccttccccgacttctcccttcctcaccctggcctcacttctccagaaccagcttgtttttgttttctgtttttacggctccataaatgagtcacgggtctgatttgatttaatttcgttgtaattgttatcttttcaagcttgtttttttccactcggttactcacgagaccacaaaaacctaaacaggacggggccttccccagcccggcctcctggtcccccgggactccgggccagggtcagcagctcctggagactgaggtggggtctgtggagcttctgtggggagggacttggtgtccccagcaggactgggtatcccgagtcccgggctgcagctctgttgctggacagccttgagagaattgttcgagctttctgatttccccagcatcctccttagcaggctttagaacagggaaccaaaacccaggcacctctgggccagaaggtgaaaggatgagtaaggtggcctggtgctggctccggtgaactggagagaacaggctctcctcaggggacggtggcctctgagccagcaggcggcccggatcttcccatttagtaagagaagccagaagtctgagattgtatgtgaaaagtcctgatttttaaatgttggccaacgagtcaaattaaaaacaaataaacaaaacctgactctgtggatatctgtggccccgtgggccacctctggtctagaaggttccaattctagctgcggcagccgtgttctcagtccttccacccttctgcctgagcagtcccctctgcctgaaactctctccttcttcctcctcatctcagtcactctcattctctgaacctcggtgtgtctcctgttcgcagctcagaagagatgacatctgcttcatccatgttcgccttcccaaggcgcctagttgttcccaattcacttttgtttctatgctttctcttccatggagggtctgtcttgtttgagaccgccttcgtagtgggggaaattagccccttagttgttaaaagtcataacacatatcctgcctgtcttatcattcatttctaaaatggggcacgatacttctttggtcatttaaaaaccgaagacgcgaggccgacgcctccagggatgtgcgctgggcggtaggagccaggtgtggggccaaggagtgggggcggaggaggaagccaggtccccagccagggggctgagggctgctcctccaaagcttgggtatggacatgtgaccagggcccaccaatcacatgcagccatgccagatttatgaatcagaagttggaaatgttgggggctgattgcttaggactccgttctggggtgggtggggctgcagcccggctatttttccagaagctgcagtgggccagttctgggggcagtgaccagggctcagcggtggccacagtgcagatggaatcattttgcagaaatgaccctccccgtgattatgtcaggaatgtcaagtacaatgaaaagaacactgcattgtgcagtcatgcaatttggtttaaatatgtttaaatgtatccacgcttgctttagtgtgttcattctaagaatctgtgtgcaccacagcaattatatgataattgtgttaggtcaaagagaaaatcaatttattttcacaatttttatcccccacgtggcaagacagtgacctagtcaaatctctctaaggtcattcttttttttttttttaagacagagtcttgctctgttgcccaggctggagtgcagtggcacaatctcggctcactgcaagctccgcctcacgggttcacgccattctcctgcctcagcctcccaagtagctggcactacaggcgcatgccgccacgccgggctaattttttttttgtatttttagtagagacggggtttcactgtgttagccaggatggtctcgatctcctgacctcgtgatctggctgcctcagcctcccaaagtgctgggattacaggcatgagccactgcgtccggccattctctaaggtcattcttcattatgatgctttggctctggttcttggtgaataactcactttacatggctttttcctgagccaaattgtccatctttattttctgagctgtggccggaggtctccagaagccccctcccagcgcctccctgggtgtgtctcatgctgcaaagggcatggcgatctgcaggctggtgctgcactcctggagtcctgatggctgtgaagccctgggacccatgcaagctgagctctgtcacccaccaccacctgtggcctcagccttcccaaactcctggctcagcccctgcctcaccttctctttcacctacttgtcatcccctctttaagcgaggccttgggtgagacccctgggcaatgctctgggcctcaaatggaagctccatggatgcttcagatgcttcagatcatggagtcctggaactactgaattttttcctccaggacgaaggaatcaccagccctcagcagactaaacctttgcaactctaaaattcaaatgcacaggagacctggtagaccaagtcatgtgcttgtttgggaagcatttattgagcatctagtatgtgctaaagtactagggagacagcaggaaacaaaatggactaaccctttgactttatggctcttaggttttgggagggggagacagcaaagaaatgacaaataagtgaaagacatagcatgtcccatagtgagaccactgggaaaaggggctgagtctgcaggaattgaaggggctggccacacagatgtctgggacagagcattccagatcgtaggaaaagcagatgcaaaggccctgaggttggaacaagcttgcattgtgggggaaagtgaaggagagccagagatcatccaggccctgagggcctcaggaggaggaggagtttgaattttattgcaagtgaggcgggagcattggagggctctgggcacaggagggagatggcctgactcaggttctaacaccaggttcctcagcttcggcaccattaacatttggggctggatgctgctctgtagtggggtcgtcttgtgcagtgtaggatgttaagcagcgtccccggcctctgcccactggagaggttgccagtcgcacctcctccccaaacccagctgtgacaactaaaattatttccagacattgcggaatgtgtcctgggtgcaggatctctctggctgcaaatggggcaagtggactgtggggggccaggatgttgtgatgagagcagagaacccagcagagatgactcccctagtctaggacaaaaggagggcgatggcagcagaggtgggagaagggactggattctgtttggaaggcaaagccagcaggatttgttggattgggcgagggagatgttggagtggataggtggatgcaggcgctatcgtttgctgagatggggaactggtttgaggggccaacttcataggtctagggcagggcccagaacctggcgtggtcacaacctggcctcagggggtgctgagtttttcacactgtgcttcaaagaatttaagtgtccagaggatgtacactggggaagggtctcttctaccggtgcagatgggaacaagtgggcaggcggcctttccttgccagcagaccaggagactctaagatgctttttcaagggagtcagaggatcagcctcattggaggactggttccaaaaggcagcctcacagccaggcgcgatagctcatgcctgtaatcccagcactctgggaggctgagatgggaggattgtgtgagcctaagagttagagactagcctgggcaacatggcgaaaccctgtctctaaaagaaaataaataaataataataaaaattagaataaaataaaagaagggattctgagactgaaaaaagccaaactcaggtgctgccagggctgggcaagcagcactcatggtgaagtggtgggagaggggtgcaggcctgtctaaaggggtggacgctgctcagtttctgccagtgtcgccccgtgggaagccgggactgacagtttttcatgagaagctgtaaatctagatcggggtgtccaaccttttggcttccctgggccacacataaaatacactaacactaacgatagctgatgagctaaaaagaaaaaatcgcaaacaaaatctcatgttttaagaaacattatgaatttgtgtggggccgtattcatagccatcctgggccacatgtggcctgttgttcgcgggttggacaagcttgatctagattgctatatgaaacctgttgatatttaaatgttagggcaaatatcaggccaggtttggcctgaaggccgtgagtttgaggcctctgtgatactgcagcccttctattttgcaggtaaggagctggcggggagagttagcacagctgcctccgagcctggcagatggtcctggatcggggctggacggggtgacttggagaggtggtgcttggactcaactgtgaagaagggtcagattcccacaaaaaagaggagagggcattgcagggggcggaggagtgtgagcgagcatgtgtggcgggaatatggaagactgttttccaggtggagggaggtaagaagacggggaactggaaaaagagttgaaggagacgggttgatgaggatgatggggaatacacggacacggaaggtcagactggacccaaaagagggttggaaaaatcacccaaacacttcaataatattagtaacttcacttctgaaattgtgtggcaacaagcagcgcgtttattttaccacttacttcgggttcttggcaaccctgcgtacaccagggaacgcttgcccaacaagaaacattctcactcgcagattgtttacaaacgcctcgaaaatttttgtaatatttttgtaaatattaaattagaaatttaatatagaattataaagtgtgagtgggttaattaaagattttaaaatttcaacttagcaggtttttctttttcttttttttgagacagggtcgcgcctagcaggctggagtgcagtggtacaatctcagctcactgcaacctccacatcccgggttcaagtgattctcccacatcggcctcctgagtagctgggactacaggcatgcaccaccacacctggctaagttttgtattttttgatagagacagggtttcaccatgttggccaggctggtctccaactcctgactgcaagtgatccacctgcctcggcctcccaaagtgctgggattacagtagtgagccaccacacctggccagcagatttctttaagtattttagaggcaatattttttccccaaaatctcccttgtgcaaattttctacctcacagctgccaaaatttgaggtggtggacaaaaatagttgatatataatgatagaaagacgtaagtgaggtatatatatagagagagtctagaaagagttcgctttcaaaggggaggatcagggcagtctccctggaggaggaggttttgaatacgtgcgttgaagggtgggtgaaatccagaccaggcaggtgggttagggaaagtgagggcatgccgggtgaagggccctgtgtgtgcacaagggtgaggtgggaatgatgagtgtgagagtttgtaccaagggggctggggctggggtgccaagaaccaaagagccatgataaggcctgtctggggctcagccaaactggggagtagtacacgagaagaggaatggggagccctagagggttttaagtaggggaggaacgtggagtccatagcaaggcagagtggctggtggggaggtggggaggatgccatggcaaccattcacgccaagcctcagccccgaccctcaaggaggcaggcaaggctgagcttccctttccagattgtttgtgggtgcaaaagggcagcaaagaatgtgggtgccttgtccttctgcccatggtctagtgtccttcccctcaccccagtcccagtggagccatcataggtgaaatataagaacaagtcacctgcgttcagtggctgcagaatacctggcctcgcacagaaggctgcggggatttctgctcattcattcttcccacctgccgcatgagggaggtgctatgtccattttacagaggacactgagtcccagagaggctaagcggcatgcccgaggttacacagccaagaaggggcacagcaagattcaacccaaaagtctgcactccagccactgccctatcatgacactcacgagctcccaccaagtctggctccagtgtttccagtaccataatcatccccatttaccagatgggtaaactgaggctctgagaggtggagtcacttgcctgaggccatacagcaggaagggtaaaagtaaagatttgaatccctgggtctagtcgactctggagcctgctgttctcccaccatacacctcagctgctcgccctcctgggcatctgtttcctcatctgatgaacaggggtgacggcgatgcctccctggcaaggtccgcagaggatcccgggtggtgtatgtcaatcacccagctcagtgcctggcactcagtggatgctttaaacgtgatgcctgtgtttattcgtataaaggtggctgaatattaaatgggtggatttatggaaggcacttatggtaatgccctgtacataatagatgctcaagaaacactagaagcagttactatgattataggatcgaccacaggggacagcccagtaacccctcaaagttgcttccttcccaagttgccttccatttatttctcccttcatccaacacactggccttagggtccaggttaggatttgggggcttggggggcttaggttacaatttgaggtgatttgtccccccctgcccatcagtcagagtgatgctgagagcactggatgataagaccagaattctaggtccgcgccccggacctgctgtgtgatctctggcaactgccttgccctctctgggccttggtttctcctttcatctgcagagcctgggccaggctgccctgggaggtgccagccccgaatggggccgggggcagttcctgtgtccccttggccaccagcctccatctcctgcctcttgagctgcaggcccgcccggctcagctgtgacgacgaaccagccaatctgtttactgaactggctgaccccttccgggaactcggcccaagcttcccagaactcgggtattaatgacccggagccacatgacggagcatgacacagcacttttgggcacaaggcagggcccagaggggtgcgtgggggccgcagcccagcccccaagccccgccagcgggtgagtcacctgggccccctgcagcttcctgatcccggccactcagctgtcctccccacccccaggatatccccagttgtcagggctgccctgggacccctcgacctttgcactagggacttagcagccgtcttgggtgatcagggctgccttctgggattacagatggggacagtgaggcctgcaggactggagtgaatgaacagtgagctctgagtaaacgtccactgtgcgggaggcactgtgcaaatacgtcacgttagtctcgcagcgatgcaacacagtggcgtagtttaatccccatatgatagatggggaaactgaggctcagagcgggaatgaattctcccaagggcatgcaacaagagcactctgtttgactggaaataatttcctttcgtctcctcagcagccgacaagggaggtgccatgtggactgtttcacagctggagaaactgaggcacagaggggctgagtcacctgcctaacgcactgagcagtctggctccaggacctgtgctctgaaccagcacctggcacatagctggcaccgacatggtctccgtgcactgccatggatgagagcaatgctggctgcggtgtcgggcggagctgggttccaatgctgacttcacctttctcaggctgcacagcctggagcacgtggctgcaccctaccgtgcgtcagtttcctcacctgtgaagggtgatcgtggtggtcctgatcttgcagaactgcagtgagggctgtgagtgtggggtgtctcaactgcacctggacacgcagaaggcactctgtgaacactgactttcattggcccaggcctctgaatccatgacagttcaatctctgaaccccacagcttcctccttcaccctttgccgccccagggcaaggtgagggcggtggtttttatgggcctgggaaccagacaggctcgggctcagagggggcgcctgctgctggcgggagtggggcctcctggttcccactccctgattttgggctgggggccggtggtgggcaggggtggggcagcactttgatgttcttcccttcattccaccaccactgcttgagcacctactgtatgccaggctccaggggacccagcagtgaacaaggtctctgccctcactatggtggaggagaggatggaggagataaacatcggtgagcaaatgcttgaagaggcgagaggatttcaccagagagaagggccgtgatgggaatcagcaggggtgtttgggagctgagtgggtcagagagggcttttctgaggcggtgatgtggagcagatgcctgaaggagaagaaggaccagacctggggaagagatttccagcagagggaaactcaccacagcacgtgcaaaggccctgagggtgggaatgggtttgggaagttccaggaaaggcaaggaggctgaaggggtgtgaggaggggacagcagcaggacatggtgctggagggccagcaggggttggaccatgcagggcttggtgggctgagtgagcagccgcggctgggacttgggcaggagcctatgtgagagatggcaagactgcctgagatcgcattcagaacttctacccatctcacagatgagctcagtgaggcccgagccagcttcccctagaaggtcagtggctggacaggcatgagaatcgagggagttcaactcccccggagaagccagaagccagaacacaggccgtggaggagagggtcccacattcatccctgcagccccgagagctgtgggctgtggggctgcctggatggcttcctggcggaggaggtgacctccaagctgtggctggggcagaagggctgggagagcgttcccagtaggggaagcagcacacagacaggcccagaggtggcggtgaggtgcaggcgttgtctgggaaattcatcactgcttgggagtcaggaaagtgaccgggtgaggaagtgttattgtcagggtctccctttcagaaggccttggggccaaggggaggagctggaattgccttccaccgcgtgcagaccccaggctggatcccaggactgcccagggacaggcacacgtctgccctcatgtggcccacagtccaggggcagggactgtctggagagattagggccatggggggcaggagggcggaggggcagacctcccatcctagttccaatctcagtgctgtgacacactccctgtgtgacttggggcaagtcactttacctctctgagcctctgtgtcctcatccataaataccacctggaaagatattctcagaactcagtgagatcattcgctcattcgtccactcatttattccttggattttttttagcgcttcctatatgccaggtcctgggctgggtgctggggacacagcagtgacaaaaatccctgcccttgtagggctgatggaagaggtagtgtaaagcagtgagtggttaagaacacagacattggagccaggggccttgggttaactcctggcccactgcttatttgctgtgtggttttgggtgagacactttacctctttgcatcctacctgtaagatgccacgtcataggattgctgaaaggacaaatgagttaatatatgtaatgtgtttagcacacagcctggtacatagtaggtgctcaattgtgcttgaatgagctgagatgtgcaataagcaaacagaagaggggtgagtggatgagacagtgtctgacagtgggaagtaaaagtgaccagctcttagcaacaagtaggcatacagtaggtgctcaataagtgtttctcctcctttgtctccttccgagtccatcttggaccttagcccataggggacttaagggcctgaggtttggaatctgcgtggaaggcgggaagtcgtctttgctgatccagaaacccagagctgagctttggggttggcaagagcagagacgcccccagcacccctgcccctcacgctccctgcaccctgtccccagcatcatgtgcagcctgggtggctgcggcgagctggggcctgcccaacgggtccccagtaatgacactcattacacaggtgtctggcagcggggggaagcgaaggccccaggggccgcattcacatggcacccagccagcccaccccaggcccttcctcgtcctttataagtctggtgcccagggcaggcgggcaggctggggagaggagctggcgaagggccagctggcgcccagtgaaaggagggaaagttgagaggtctgggtgccaagcactggtgtggaggccaggggaggtgggcacggggggcgcgtgtgtgtgcacacgtgtgtgtcagggtgttttggagggggcgggatgcagtgaatctgtgtccaggtctatgcatccccctggcctgtgtgtggagatgagagggtctgtgtagatgaagcattgatggtcccccaggtgggtgcaaaatctcccatgcccgtttcatttgttctttaacctacactgtgaggtgggtaccaggctgggtccagcctggacctggtgatgtcagagccagtcccagggcagccctagactctgccgtctaagagctccaaatccagggacagacagacgccaggcagaggatcaggacatcccagtgaagactttgatggagaaaaacaaggcagggggctgacagggatcaataggatggggtcagaggcctcactggaaggtgagcttggctggaggcctggaggacgagccgccatggcaagatctgcaggaagagagttctgggcaggaggaatggcaagtgcaaaggcctcgatgcagggctcagcttggcctgtgtgaaggggcgagtgaggaggggactgggggccggggcaggtccagagctcatggccaaagtcaggagtgtgcatcttctgagcgcagtgggaaggttggcacatggtaggtacacagatgggggctccactggggtgaatgggtttgatgagagccgggaccgggccctctgggtgtgggaacgattggctttcagagctacagacaggaacgtgggctgctcaattgtatttgaacctattctcctgggttcaaacccctcctggatcctggaacctgttattaagccggctgcaccccagggcaccggcctttatatccagacagggccctggcccccaagacgggggtggacgggtgatactggtgaaccccatgcctgccccaccccctgccaggcccctcggcagggccaagtctgcttctgagagcaatgagcatctctccttttacagatggggaaactgaagcccagagaaggaatgggtatgtcctgggttcttgtggcagagtgctgggggcagcacccagaaagcctccgtcacagctcatatctcttcctacttcatccccgcccacagcgggctcctcctaataggactctggcagggtagcagctggtgtccaggcagagctagagggaagagctgggtccaatttgagaagcctctgttaattgggtcctataggaagaactgttaacactgtgagtttcccatcaccagaggtgtgcaaatagacctggataacagcccttcacctgcttagagattacagagaggttcaggcggatgggagaccacttgccttctagctgtgtgattccacaggacctcggaacaatccttagctcaagcctcagttttcccgactgtaaaattgttttttgtaataatcagagtgacctcattaaaaggacaactttgttgataaaattctcctgcatttatccaggcctcgcttggttccccagtgctaagagacagctctagccctcaccatggcccgcacatcctgtagccctggtccctggggccttccctcccaccccctgattctccccttcctctctctgctgcaaccacagacttcctccctgttgttcctctcctacctcagggcgtttgcagatgctgtgagcattggatgtcgggcggagggctttccctaatttcaatctcccaccagtcctatcaggtaaataggagatccattttacagatgaggaaactgagtctcagagagctgaagttaaagacacacagctttttgtgaatccactgagtcaggatttgagctcaggccatctggaatctaacaccactctcttttcttcattccttatgtgacttgttttcattttcaaaactttgctcaacagttgccttctccaggaagccttccctgactaccctctccatccaccctcccatgaccttcctgagtttcacctttgctgcactgctcacactgtctctcaattatctccctttttttcttctcaacagctttactggggtgtaacaaacacacgataaactgcgcatattccagtgttcatgtggatgagtttggacatatgcacacacttccgaaaccaccagcacaatcaagacagcagacatatccatcgcccccaagggtgtccttgtgtctttttgtcattcatccctcccggccgccccatccacactcccatcgcctgccgactgtggctgatctgctttctgcggctgtggattagtttgcgttctctacaattttctgtaagtggaatcatgtggtgtattctttactgggcttcttttcctcaacattatgattttgagagttacccacgttcctgtgaccattctctttttttatgtatctgccctgtccccctcagactgtgagttccatggggcgaggactttgtcatatttacctctgcgtccccagcactcagcacagggctgggcacacaggaagtgcctaataagtgttgactgacgggaaggaggatgaggacatgcccaaatgggggaacagcgggcacatttgcatggcagtgaggagcccaaagccggattaagaaaaaacagcccctggaatcatctggaggcctcgtggccccatcagataagcatatctgctcatccccatggctgtctctgaggagcaaagatctggattgcacaagggctgggcctgggctgaggaggcgctagtggtccctttatcttgcgtgggcattcggcgctgtgttctagaactgcacagcccacgcaccccggcaggcagaggcctgggctccggcagcgggtgggcaggtgggaggcaggaagaagtggccacccagccctccccaaaccagttggactcctttgcagagattactgcaggcgctttgggagctggctaagggagagtgggaggcaggaggaaaaagcaggaggaggggaggaatcatttaatgagcaaatattatagggaatttccagttcatgccccatcaggctgggcaggaacacagtgggattactcaggcggtttccaggtaccagcctcaacctcgaaggttcagtgtggctcagatgcctctaggtcttcatcgctggctagaaacccaactagccagggtgagaaagtggcggtgagttacatcctgagacaaagcctgcaaccaaagtcgagtctaagcatgcgcttcctgcatcaatctttgctgagatgaccttattgcccatttcccagacagaaaaactgaggctgggagttgtggcattggctaaggccacacaggggtcactgcgcagtagggacagcttaaaagccaaggccattttggagtgactccttcaacaagggccacattcttttgataaatacttattgggcacctactgtgtgccacacactatgctcagctctgcaggttaaaaaaaaaaatggaggccggtcacggtggctgacgccggtaatcccagcactttgggaggccgaggagggcagatcacgaggtcaggagatcgagaccatcctggccaacatggtgaaaccccgtctctactaaaatacaaaaaattaactgggcatagtggcacgcacctgtagttccagatacttgggaggctgaggcaggagaatctcttgaccccgggaggcggaggttgcagtgagccgagatcgcaccactgcactccagcctgctgacagagcaagactccgtctgaagaaaaaaaacgtggagtctttgggcatatattgtgcattgcatcttatctacagatgaacacaatttttgaggtcagagatgttttgtggaactttgttttcttctttgtggaaacaagaagtttggaccagactagcatttcccaaatctattttatcatttatccattttgaggacacagatctgagggacacagagtctctgggggtactaataggagtgacaagggggaaagtgttccattagccattgggtttgggaattcctgggtgaacatttgccacaggtgttctcagtcttggatgctccaaagagctcaatgagcatctaggtggttaggtcctgtgagttaccctctgggatatctaagggagtttgttcactgtttttctgacttcatgagtcctgtttggatgctgcttcctccaaggagccttctctgaatccctagaaggacctgagtccccttctgtgaaggcacctgcctggagctccctttgacttctgaatattttccatcttgggttgtagctgtctgtttccatcacttgattgtgagcttctcaagggcagggccagccgtgattcacttcttggttctggtatagagaacagaatgggtggatggagcatttaatgggtgaaaagatgagtgatgacttgatggatgggtggatagtcaaatggataatttaatggctgggtacatgtgtggagataagggaactgtttatgaatggataaaatggatgaagaaatagatcaatgaaagaatagatgaatcaatgaatgagataattaacaattgaattaatggatgagtgaacacatgaatgaagaaattagtggataaatggagagatggatgatggatggttgaataaataaacaagtgctggattttaaattgtgtgatggatggagcgggtgatttcattgttgaatactgtgaattactgatggatgaatgaatagataaatatataattaaatgaatgaattaatacataaagtgatggatgacttaatagatggctagatgaataaacagataaagggataaatgggtagatggattggtgattccatgagtgaatgggtgggtgtatggatgggcaaatggttggatggatagatgaaagagtgggtggatggatgagtgagtggacagaagaatgggtaaatggatagatgaatggatgggtgggtgggtggataggagaatggataggtagataaatgaatggattggtgggtaggagggtggataatagaatagatggatgggtaggatggatggatggatggatggataggagaatggataggtagaaaaatgaatggattggtgggtgggagggtggataatagaatagatggatgggtaggtggatagatggatgggtaggtggatagatggatggatgagtgggtggacggataggcgaatggatgggtagataaatgaatagattggtgggtaggagggtggataagagaatagatggatggataggtggatggatggatggaaagatggatggatggttagattgattggtggatgaatagatgaatgggtggatgagtggatggggaaataggatggaggagtacatggatggtggatgagagaatgaatggatggataggtaagttggatggatatacaggtgaatgcatgctatgtcataagatcggaactgaggtcaggaggcaggaaaattcctgtgttcctccctgatgcagcagtatcaagtttttgaagtttgaaagcttagtgaaaactttgagtcaaatctccagaaaattgcatatagacacaaaatgttagcaactttatgggagtggtggtcatggagcctaagagccacctacagacccaaggtgaggaatcccagtgcagtcttatgtattatttttactctctgagccctgatcttggagaggaacccaggcccagtggagggaaggcagctgagatggggacaggtagtttcctaaaggagaagacacttatgtattcattcattcattgcacaacattgctgtgacctttctggatgcctgggagaagataaaggtgcctctcataagtggcaagtgtttggagcttgaagtcagacagattgcatttttaatctcatctctgatatgtactggctgggtgaccttgggaaacttacttcacctctatagaccttctcttcttcatgtataaatagggacagcaataatgcctaccctattgggttgtgaatatgtcaacaggtatgtaaaacatgtagcccagtgctcagtgcatagtaaatgctcaataaatgtcagttcttctttttcttcttgcatgactactgttgtcttgcactgggcctatgcaagatgctgctgagcccgagatatccaaggcatcatcctggccttttgaagtgtccgcagtccatcagggaacacagacaagtaagcagaggtttccattcgcacagggtgttggggctgagatagggaatcctaagacctcatgttcagggtcatctgatcctcagcatccattcctattaatatctctttctagcaagaggctgcagagactggaaggctacacgccgcattccccagccttctttgcagcaggggctctgaacgctctgcaggtcccgccaggcagatgccttcctgtgagagtcaggaagtgggggccgccttgttttttcctgggctctctttctgctggtgagcatggtcatgggatggattttcttgcagcaaccttggcgtccggttaccactcttggggagtctagaggtaggggtggtggtggtggcttcctcatctccagatggctggatggtgctgtgatacgttctcaaagtctacagctcctctgtggcctcctgattccccaccatcctgagtggctggcagctctcctgaaggtccagttctgctgtgtggtgctggtgcctctccagcccttctagcaatgttgtgagtgttcaattccctgtgttggatcctttctgcttaaaatgcctggaaggaatgctgtctctaaaatccaaaacaaacacaaaatttggaagggtttctggttgccataactgtagtttgactcacacatggtgggaggcggggagcactgtaggacctcagcaggtacctaaaccagacttagggggtcagagaaggtttacgaagctcatgacatgtaaactgaatcctgaagggcatatatggagtagtcagacaaagagttgagtgggaagaacacaccaggcagaaggaatagcccgtgcacggctgggcacagtggctcacacctgtaatcccagcactttgggaggccgaggcgggcagatcacctgaggtcacgagtttgagatcagcctggccaacatggtgaaaccccatctctactaaaaataaaaaaattagctgggctgtggtggtgcatgcctgtactcccagctattcgagaggttgaggcaggagaatctcttgaacccgggaggtggaggttgcagttagccaagatcgtgccattgcactccagcctgggcaacagagtgagacccaatctcaaaaaaaaaaaaaaaaaaaaaaggaacagcctatgcaaaggttcagagatcagaaaagacatcgtggagaagtgggtagttcgggctggctggaacatacaaattgtaagggagaggtcagaggctttaaggctggccaaggtgctacacttcctttgaaaataatggggagcttctgatagtaaacagcagaaaatagtaggtgtctttcaggctcctgcaggaggctgaatttgagggagaggaagtatcgttgcagggaaagtagcgaggtggcaaggaattgcagccacctgagtgagaggtgatgagattgacctggcatggcagcctcagaggaggggagggtggatggatttgagggaggttgaggacgagactcccaggctttggtgaccaattgggttggaggcatggcggcgggaggctttatggatgatgctcatgtttctggctttggacgctgaacagttgtgcagccttccaaaagaagggagacaggcagagggacagtttgggggaagttgctgaacttgctttgggcatactgatttggaggatgcctgggggccatccaggaggaggcatcggggaagtgtacagacatgtggtcagaggctgagacaacagattggatatggacaaccacccacgactttggagaaaatgagtgaaatattcattcaacaaatagcacaggggagcctgagacacactatctgttcatgtctgaatacctggcagtgggccaagggcctggctgcttgttcaataagccaggaggaagcgctggagcaagacttggagggtgggctgggttctaccaggaagagacaggatgagggcccagtggtcaagtgcgtgaggcctgggtttaagtccagctcctctgtgtgttgattgcaggggcctgggccagatgttttccctccctgagcctgtttcatctgaaaattggttataagggacatggtgaagcttcaaagttgtgcttgtggaagcaggtagcttggagcatggagcggacttttgggggacaacttgggacacagagagtcacccacttcctggtgtggcagagccacgggggatggggagagagaaattaggatccgcctgaaaaacatccacagctgtgtcccatgtgagaaaggagacctcggctcccgcccaggctccctttcaccccccagcctgctggagctggcgggcgggggaatcatctccatggagtggaggaggggaccagatgacagaaaacttctccacgtcccttggagctgctggagctgggtcctggccaccgtcccaacccatagctcctgactcggggtcaggctgagatttgctccttctctgcctgctccattcagctgcagcgaacagaggctgcaaactggaggcctcaggggcccaatctggcgcccaagcctgtggggctttcctcagcccacatagaatttttaaatgaatgaagccaatatttaagaatctgtgggtactacataaaaacctgtgttttgattccctctggaaaatcagggcacggagcatccgatcatattgggccctgttctctagggaccaccatcaaccggagctgagaggtgactgtcttcagacaaggcatgtgccccagtccccaccactccctcttgtctctctgatgctgaggccaaggaatagtagctatttatcatcttaccccagcccactctgctcattttaaattcctgcctggtccctggtgacacagttttcaaccccagagccagtctctttttcctctaaaaccacccagactttggccctggttctaggcctgaattggcttcccaagaaccccagtctctgagctcctcagggtcatggtttacctttccttctgccccacaaggcccagcaccacccccgggggacgatgacgggctgagacttggctggtgttggggggccggctgggcctgtgggaggcagacccacatgtgctctgagatgtgtcagctgggcctggtcacactctctgcggctcatccctgaggcatgtggaaccaggcgctgtgctcgtggcccagccagggtggtaggcggggccaggcccgggacatggtgtatgtcaaggccacgcacaacaggcctgatgttccagccgcaaacacattggttggaaagaggaaaggaggagggagaggcagagccgctttaaagacagtacccaaaatacagaggcagaaagagccgaactcacactgtaagttgctgtgtgaccttgggcacgtcacctcacctctctgagcctctagcttaagatagaactaaggacagaccccagcttgcagcctcgtgggcatatgcagtggtacagtggctgatgtggggcctaatgcctagaagggcagcctggaatggaggcaaaaatcacagactttggggccagatgaggttgccacttgtgagctgggtgaccctgggcaggtcgcttctccatctgcatccccagggaaggtcctcaccaagttattctgccaaaaaaagaatccattcaccgaacaaatatttattgggcaattcctgtgggtcaggcgctggggacatggcaggacataggacggtcaaaggtctctgcccccgtggagttcacacttgtggagagagcaggcaatacacaagataaataagttgcatattgcatttgagaagatccatgctagggagagaaatgaagcaggaaaaggagatgggatttcaatgggcggggcaggaacagcctggtgagcaggtgacagctgacaacgatctgtaggaggtgagggagggagccgcggggaggggagagtgttccaggcagtgggaacggtgcacaggccctgagtgggggctgtggctgttgtgtttggggtgtagcaaagaggccagtgtgtggaacagggtgagcgagggagagagactaggaggacgtgagggccaagaggccgtggggggcggatcctgcagggccacgtgggctgttaaaggactttggctttttctctgcaggacatgggagtcatggagggttctgagcatagaagggacgtggtctgacttcagttttcatggatccctctggctgcagtggagaatgggctggaggggccagggccaggacagaggcaggggggatagtggggaggtgatggcaatagtccaccctctgtttagtgatcctggtccttccccgctctaaagccttcctgacttcccatcgcctctggacaaagctcaaactccttagcgtgacattcaaggcccgcttacctgactctagctgctccctgccccggctcctcactctccacagcatcccaaccagatatccttccttccctgctccacatgcggtccacctttgcccgtgctgtttcctctgccaggaatgcccttcctgtccccctttgtgacccagttcatgtaaggctgagtcccacaagctaggagatagaaaaggaaggaatagaggaaaggctgttcctggggagggtcagggagggccaggtttcggctcccctcttcttcctggaattcatcctccatggcctccgcagctgagggcaggctcaggagctgggagtggggctgtagcccacacgaccatgctgtgtgaccttgggcaagtcacccaccctctctgggccttggcttttctgctctgtaaaatggggaggatcctggagctcctcatggtggttctgtgcacccaagggctgtggcaactgtgggaataatggcatcctggggaagacataactgcacttccttgcccagccacgacaggccagctcagggtggccctgagctgatgctaggggtagcttgcaggaggggtgccctctgaagccctgagcatctccagttcagtcacccctgagtgacctgagcacctacagtgtgtccagccccagcactgtgcttgagcacggacagaggccagacagcctggtttcaaatcccagctctgtcacttcctagctgtgtgatctgggcaagtaatgtaacccagctgggccttggtttctcacctgtgacatggggacagtaagagtgctctcctcctgggaagctcaaagaagccagtgtgctcctataaataccatgctcagtgcgtggaggaagcagcttatcaaggccaactagcattttttttattattattattattattattattatcaccactgtcatttcctggctttgtggcctcaggcatcacttgcttcactgtgcctcagttttctcctctgtgagatggggtaatagtcccaccttcgaagagttgccatgaggactgagcctgacgcatgtaaatgagcctggagcagagtaggtactctgtgatttttgtttgtttgtttgtttgagatagggtctcgctctgttgcccaggctggagtgtggtggcaagatcttggctcactgcaacctctgcctcccaggttcaagcgattctcccacctcagcctcccaggtagctgggactacaggcgtgcgccaccatgggcggctaatttttgtatttgtagtggagacggggtttcaccatgttggccaggctggtcttaaaactcctgacctcaagtgatctgcccgcctcggcctcccaaagtgctgggattacaggcgtgagccaccgcgcctggcctcagtctgtaatttcttaagaaaaacatttcaaatgcagaatttattttattcactaccataagtcatcactgatatatgaatagtccctatgaaatcctttgttattcctctagtcagacaaatgctcgtttggtttaatctgacttaacaaattaacgagatgaggaagaaaattccaggccttgggacattcactgaagcccaaccaggcaccaagagacacatgtccttctagtccttctaatgaagagtggaggaagatcaacacgatccttatttacacttcaagtcattatgactctgcagctgggtgaccttgggcaagtcccttcccttctcagaccctgagtctcttctttcctaaaataagtgtgatagcttcctacctgccctgtctagctcacaggattatggtctggctccaagacatcacggctatcatttattaagtccctcctgtatgcaaagtccctcttcctgaccaccctgcctccttccaggagggaactggatgctgcttgttttcaggacaggacagtgaggctggggaggtggcggaggatgctgcccagggagaggaggaagtagggggctggggctggctgggctgacgcagctgtgatgtcagacacccgccacaggcagccggcccagtgctaactgtgcgctctctgctggtctggcctggcgcctgccccctcctccccccgccaccccccttaaccccttcccggcctcctcttcccagacggccatcccccaggcccagccttgcccacaagattcccagatttcacaactggggctggcgctgaatcatgtacagtaagtccggggagagaaactcccggctgcctggcgtccccgggacaggacagctgccaagcctgccctccctcccaggggcccaccggcagccagggatcatcccctctgggcccctgaccagctagggggtgatgggcgagacacacaacctcccttggctgtgccagggatcaagggaccgtgtggtttccagggaaccttcaggctctggagggataggggcaggccagggtggtgggagaggggtcgaagtggccttgtattcaaccacggcctgccaccaaatcactggtgacctggagcagtccctaactgtaactctaagttacggtttccttatctggaaagtggggataatcacagccctgacctcacaggtggctggaaggactctgagaagatctgtgtacagtgcttaccgcaggaagcgcccaataaatattattattattgttgtgacgtcgagctggtcatgacacgctttaagaccctggagaaatcatccagttctttggaggacgtctcccctgaaacacccacccctcccgctgtgatacaaattacatcttatcttttcaaaacttcttcagtacatcagcaaacatttattgagcaccactgtgttccgtgcctgctaccaggtcctggagatacagcagtggacaaaacagaaagacatttaaaagccctctgttctcgtggagcctgtattctagctgaggagaatcagacatttgaggtcatttcagtaagtgagcagggctccaaaggaaataaagcagaaggtgcgatggagagagcctgggaggtcccctctgatggggtgacatttgaacagaagccccaacaaagaggagaagcccacgtgcaaaggcagggggtgggaaacggtgctccaggcagagggaaccgcaggtgctaaggccaggctgtgggatcctcttgttgaaggctcagcaagggcagtgtggctggagcagagggagtgagtgaggggcagaggggtgggaggtgagcttagtggggcccccaccctggagcagctctcctaatgccaggctcttcctgaaagtggccacctggtgcctgacttctacctgtaggggcagccacctgacaagggcccagcttcttcccatccggggtcccaaggccccggagctgcctgctcacagtagaaagcctcattcccaggaaccccacggagggccaggctccccgcccctgccctttgctcaggctgccgctgggactcccctgcccctcccggaggatgtgaccctccctgcctctcagccgctcagagtgtgggcatctgcatctcggagtctcagtgtgcccacctgtgagatgggcaccatgttgcctcagggagggagtaaaaggaggaagggagctctggccttagtatctgtcccctgaaccctggaagaaggaaaacatcggggctcactggggaccaggctgtgcgttcatagctggacggagagctcaggcgtgtgtatgtgcgtgtgtgcatgtgtgtgcatctgcgtgtgtgtgcatgtgtgtgtgtgcacgtatggggtgggggagacgggggtggcatcaagacccaggagccacaagagtgaggaagagggaaggggtgggcttccagggacagggggcagtcagagcctggttctggcgcccaagtggggattggggcagggggaataagaggcctgccctccctcctgggggcccagcggcagccagggatgatttcctgggatgttttaaaaatcatttatttctagaaaagtctttcatcatttcccttcaggtcacggaggctgagatggctgacggggtaggtggctgtggcctgatgtgtcacttttggcctcaaactgaggcaatggggacgaagtggctgcgaggcgcagtatctggcatatgtgtgagaaacaaccacagtgccctggggaggggccacgtcctcaccccgcaccgccagggtctcagcgtgtctcccaaaggtcatgtgggcctttaagaggtggttgggtcctgagagctctgcccttatgaatggattagtatcattattgcaggagtggcttcatgatggagagagtggatttgtcatgaaagtgagttcggccattccttgctgtctcacgtgccacctcttgccatgggatgccctcgccatgggatgacagcaagaaggcccttgcttgagtgagcccctccatcttcggctctccggcctccaggactgttagaaatacatctctgttctttgtaaattacccaggctgtagtactctgttatagcaacacaaaacagactaagacactactatgtagatgaagaaacaggcccaagaggtgaggagtgttgtccaggtcttctggccagaggagcggcagagatgggatttcaaccctgggactgtgtggcttgtgaccactcctagcttcagccctgcccggtgctgaggggtttggggccagaacgatggccagatgtttgggcacactgggccctacccacctggaaagaggctggcctggggttgaatgagaaccagaagtgactcaggctaggacccctctgcaccctccctcaggccgtgggtaattacctgcccaggttaatagcgcccacttcccgccacctttcatcaaggctcctggagctgccaggcagtaattaaccctcacagcacccttctgaagtcagcactggaggcagacgtgtgatgaaacacgtttattacaggtaggtaaactgaggcagaacccattgcagcctgggagcctagcctgttgttcccctgtgactcagcagctcaatcaatctctgctttcttcccacaggaagcaccagttagcccagatgcttctcatctttggagttgagctgcaggctggagacctggaaggccctcgcagcgcctgctcccatcctctcacctcacgaaagcgcaggaatgtgggtttggagccaatgaaaagtactggaatctggctctgctctgtgaccctggacaagtcactgcccctctctgggcttcagtttcctccttggtaacacagaatgattatacctaccccttgggtttgttgacctgaatctacccctcagtcattgcctttccttcttgctgcagccacactggccccttgacagttccttgaacacaacaagccctttcccacctcagggcctttgcatgtgcagtgccagatgcctggaatgtccttccttccaatctccccatggccggctcattctcatctttcttggctcaaatgttacctccccaacctagacagcaccgctgccacctcttcaccccgtcttactcttcttcaagcacttctggaggtatcttgctatttatcttgtttatatctttttcagctccatgagggcaggggattttgtctgtttcattcacaatgtgttcccagagctcagcacagtgtcaggcacacactaggtgagtaagaaacaattgcttcctctacctcttcccctgctagccccaagttcagctaactggctgtgtgaccctggggattgcttttcacctctctggtcccttattctcccttgtggacaaaggatggcctgggcatgagtttcttcaaggactcgggtagcagtgaaatccctgggaccctagcctcagtacctccccaggcaatggggtagagagcaagaaggcaggtgagcaaggaccagcctccgccacgcagacaccctctttccggcttctctgtcctcctactttgccctgggtttgtggacttactctgggcagatctccacgaccaaccaccccctcccttggcatgtctgtcagcacccttgggggaaagaatttggaaaggggagggagaaaaagaaagcagggtgcgaggggctggttcccacacctgtgtaaataatttgtcatcttaaaatgctcaagtatgctcacctttaatgcctggttcttgggcttattttccttggcaaggcccccacgggagtggaatttcggccaaagggagcccagttgtcatcttctaaacatgttcccaggccgggggccggggagggctctggctgatgctccacttccgtccccagaagtgctggaacgttcctgggatctagggagctgactccagtcctggaagctgtcccagaattctggaatgttggaattcaaacggcctcctgcccattttccggaggaggaacataagacccagagaggggaaggggttggcctgaggtcatacaatgtgcagagacgagctagagtttgctgggagaaggtgcgggtgtgtggacaagtcagcatctatctcccattttcaggtaacagcacctcgacttcctactgaagaaccccctcttcccttttctcagtccatgaggctgggggtgcccagaggcctctgtctccaggggtggacatgtgaccgggtcttgctctagtgattggtccagggatgggcacatgactgagcctgcccaatgaaacttgatcttgggacttcagggttggccatgatttgtgaaggagatgccattttccattggatggacagtgagcaagtgaacgcttagagaagaagaggacaaaacaagggaaaagcctgcctgacaggaagcagcacagagctggacaggctttgaactcctggatcccactgtacctgaaattaggcaccttcaactttctagttatgtgagccactgtctttcccatttttggctgaaaacagttgggactggctttctgtcccttgcatacagaaggtgctgactgacccctgccccatggaagaagatactccaggcagaggaaatagtgtgtatagacacccctaagcgaatgccaagcggggcactcatgtaccaagaagaaggaggaggaggcacctgggagctgagcttaagagttagtcgggtggtcaaggtgggagaagggggtatctttagcagagggaacaaccattgcaaaagcttggaggggtgactagttagtgaagatcaactgtgtgctgagctcgtgttgggtggcaagggacacagacgaaaagggcacggtggaacccagctacttctcacctgctccagcgcagtgcaggcttgtctgcttttggagccgagcctggacacctccgtgtccttcccccggcagagtgctgccagcacgctgtctcagactctccagcatctcctggttgatgtgcatcatggggaccacacaagattattttataggctgcacaggcaaagcataaaatcacctcgggtcacatagcgagagttattctctctgcaaattctttacagtctttcctttatatccagaagagtctctgtgtggtgctaacttgcctcgaagaccaaataattgctagtctccctttgtgaaaaggagagcaggtgtcaggctcattcatgtctcaggcacacaattgtatctagctagacttttcaaaatgtcctatagagctgcagcacatatgaatgaggtgtccagctggtcccaaacctgtaatcggcaccccagtgagcagactggacatccccacccccacagctgccctttctcccctccactcatgttccctctagggccaccacgatcccgacttgtatcaccacagatgagtttcacatgtttttgaattttacatcttatctgttttctgttcctatacaagtttgccttttttgaattccatataagtgggattctacaatgtgttatctcaatttgagtctgttttttttttcctgctcagcatgatgtttttgagatgcatatatgcggttttgtgtatctgtagatggttcttttttattgcagaataatgttccagggtatggatgtaccaaagcttgttcatccattcaccagctgagggatatttggactgtttccagttttcagccattataaataaagccactagaaacatttgcaaacaggtttttatgtgaacataaatttttgtttatcttgggtaaatttctaggagtggaattgctgggccaggtggccaagtgtatgtttcactttatcagaaaccgctgagctgttttccaaggtgtctgtaccatttttcatccctaccagcaatgtatgaaagtgtcagttgcttcgtattctcaccagcacttggtggtgttagttttttgtgtgtgtacatgtgttttacttttagtcattcaaataggtgataatagtatctcattgtggtgttagtttgcatttccctaatgactaatgatgttgaacatctttgtatgtgtttctttgccatccgtatattttctttggtgtagtatctgttcaaactttatgtcagttaaaaaaaaagacccaattgttttcttcttaatagatttggagagttctttatatatattctggatactagtcaagcctttgtgaaatatgtgatttgcaaatattttctcctgttctgtggcttgtctttttattctttcaataggtagactttaataacatcgttttgttttctttttaagtatttttctggttatctttgatttgtggcatgtattctttggtttttcaattttagtgataacaccaaatgttttcttttaaaatgaatttatttaagtaaaaacgtcagtaaatttgaagaaacacattaaataaggaatagtagaagtggacagtagacagcataaaaatcgtgaaggcagtttccaatttgcataaccaaagtgtgggcagctccgattcgttcgtcaacaaatactgatggagcccccactgtccaccaggctctgagccaggtgctggggacacagcaccaagcgagatagttgtttgctcttttaatgctggtttttctccagtgagtctctcttcatctttcaaaagccaatttgaatgacccttccttcatccagaccttccctggaatgtttgtcacactctactgcaaatttctatttctgtatctcccaggcaaggggcatgtcgggcagcctctggtagggttgtagagagcttggtgcatagatatctcaataaatagcctctcacatagtacaagctatgatgaggtgctgaagaccagttgctgattcaattggttgaaactagccaggcctgatgaaggggcctgaggaccttccctgctgcagtctggctgaccccaagcaaaccaaagtctctccccttggcctcccctcccacataaagataccaagagaaaaagcctcccaaacccactgccttcagcctctgctatttgcttcccatccagtgcccatggatgcctttcctgcaagacacagtattcacacagacacttaccaggcatctttgttctgacctgccccaggaccaccactttcaccttggcctcttaccaccattcccctgttcctccactccagcacaccagccagtgtttgcccctccaacatgcccagctcattcccacccctgggcctttgcactagctcttccctagttctttgccttctctagctctccacattcagttctgaacttcactgaccctcctcagaggctctctaggctatgctaccaaagccctctctcctctttttttttttttttttttttttttttttgagacagggtcttactctgtcacctaggctggagtgcagtggtataatcatagctcactgcagcctccatctcccaggctcaagtgatcctcctgcctcagcctcctgaatagctgagactacaggtgtgtgccatcatgcccagctatatacatatatttttaaagtagggatatactcactcactgagctcagtatgtagctcaggctggtctcaaactcctgagctcaaacaatcctcccacctcggccctccaagtgctaggattacaggcgtgagccactgtgctcagacaccccatgtatttttgatcccttcattctgtttctgtcctttgtagcatggaatgctctcatttccgagtttatttgtgtgtttgtttgtttctcgccgtgtcccctgttggagtggcagttccatgagggatttgggtctgtccttctctctatctccccagtgcctagcacagtgttcagcacacagtcggtactcaatcagaatttgttgaatctatgagtgaatgaatgaatgagctcatgagctctcccttctccagatgcactcacggcaaagttgaacccatctatctgcccatgcgtcaggctagttgtcctgtgggcccctcctgggtgggtactgagggatgcccactgggtccagccaggcctgtgtcttgtcagctgcccaggctaagggactttccattgtccttggagttggcctgtggaaagttgttctcaggacctcgtgagcctggggccatggatggggctaaaggtaactgcaaggtatagggacccggcgtgaaattccatcagttaacactgtaagtgaggctttccagctccctttcgtcctccctgtgatgccaaggggagggagaaactccacgtggggcttgtgtgtcttgagcaccttcctaccacctgctttttcttcggaagaaacagagcagatcccaagtacaagccgtcatcggcaatagtagctggctttgtttcacttttttgtatatttcaccaattgtcttccatttgcagcaagtgccttagattgggtgcctgcaagcagaccttaacagaataaactgaaggcaagtagcctatttgggagatgcctccagaaagcactggtagggaagtgagatcagggaggaagggctgccaatctcaagagcgctaccaagccagtaaccacttaggcagctggggctcggtcctgctgtggcacgctgggagcccatgtagtaacggagttagccccccaggggcggagatcgggtggtcagggagctggggaagggacatgtcagctcctgcctatcattgcttgacagctgccgcttggagtgttagttcccagcacatccagcctgccccatgagcaaagctcacaggtgaaggggacaggtgctgcaggtggaatcctgtctgtgttcaccggagaaaagggagaggaggtatgggcagggcacagacaacaaaggcctcacagtcaacactggttcctcatttaaagccaggataaaatgagttcatttaaaattaagttttcgcaaacatttaaaaagcgaattgatggaaagagtaggtaatacctgcaggtgaaatgtgaacatggcaaatgctgctatttttcaaggcgtccaaagcctttaataggcaaacagtgttcttcacgacccacaagaatggcgtgtttggggcggtgaaaacactctccctttcctcccagcatgccaggctcatgctcactcctaacactgcccaggacccctgggagtcctggaaatgggccatgaggcttggaggcagaagccctgtgtgacttggggtttgtcccttaacatctctgggcctgtctgttaaaaggggatgttctcaagtcacataaaagagtaaatgtgcaaaaatagtcaaagcaatgctgaaagaagaactaagagagaggacttgtccgtccagacattagaatatatgacaaaggcatagaaataaaacagtttggtattggcatctaagtggacaaatacatcacgggaacagaatagcatccaggaattaacccggctatcacctggcctacctccactcatagatgtgaaaggatttagaaaagggaagagattggcaggcatgggattctctggattatgttatgtctgggctggtgaagaagcttccaacaggctccccatctgcagccctcccctctaacctaccagccatggcaccagggacactcactgtcatgagctgcactcacccccgctctgctctggaaatatcagagcctcccacgcaagatgggttagaccacagttgtcaccattcctccttttgcacttctctttgattcttctgattaacccaaggagaaagtctcaggcgggcgcggctggacttgaatacctctcccacgtttgctcgtctccctttatgaggcagagctggccttaagctcagggccttcagcaggcaggagaatggagcaagaatttggtaacgttcttttgtgattgttgttttaaggttactttctctttacagaaatgaaaagttgtttcctccttctgatagtaacacaaattttccttttaaaataattttttctaatccatattacaatgagaatgaacctccaaaacatgatgctaagtgaaaaaagccagacacagaggtctttttttttttttttttttttttttgagacaggttcttgctctgttgcccaggctggagtgcagtggtgtgatctcggctcattgcaacatctgcctcccaggctcaatgattctctcacctcagcctccccagtagctggtactacaggtgcgtgccaccacacctggctaatttttgtattttttgtagaggcagggtctccctattttgcacaggctggtctcaaactcctgggctgaagaaatccttccgcctcagtctcccaaagtgctgggactacaggcgtgggccaccatgcctggccagaaggtcacatattgtatgattccctttccaggaaatctccaaaataggtacatccattgagaccagtgaagaatggtggttgttaggggaatggggagcggctgctttatggtcacagggtctccttttggggtgatgaaaatgttttgtgattagctagaggtgatggttgcagaacacaatgcaaaaatgccaccgaaatgttcactttaaaatgcttaatatgatgctatgtgaacttcgtctcagtaagttatttttttaaaaaaccagtggagtaaaccaaaaaatcaatttacttaagaaaaggtatgaatggctttaaagatggcttttaagtgacgtgtgggagacagtggctaaggggatgattctcacccatcgtgagcctgggaccatggatggggccagaggtagctgcaaggtacagggacccggcgtgaaattccatcagttaacactgtaggtgaggctttccagctccctttcgtcctccctgtgatgccaaggggagggagaaactccacgtggggcttgtgtgtcttgaacacacattggcttataccttgctcaggcctggaaggccctctgctcactgacggaatcctatgcatccctgggaacccagctcaagcctcacctctacgggaagcccttcctgattacacaggtggtcaggcggggtcagtcctgcagcccttcagacccggttgtgaatcccagtcttgccacttactagtgggaggagtctcttaacttagacatattgtttgactaagagggcctcagtttccttatctggaaaatgggggcttatgatagctcttatctcactaggttgagctcctacatagaaagttttaggacagaacctggggagatgtagctgcccttcattcacacttcagtctgacactgatcacatcacagttgcattccttttcctcctgtctcctacactgtgggcaagggctcagcctttgtgatctctgtatcatgttgctgtacagaactcacacacagtaggcacccaagaagggcgggttggctgacgtgcagaggaactcccagaattccacctcttctctcacctccacggtccccaccctggtccagaccctgcatggcttacctggactattgtggtctcctcctccctggtttcctggcttctgtcctgaatcctccacctccaatccattccccacatgcagccagagagatcccgtgagaatctaagtcagatctcgtcccttctctgcctggaaacttcccacagctctcaccttgcttagaggaaaagccaaagtccttcccgtggctcatccactgtgggacatgccccaggtcctctctgctctctgttcctcctccccaaggcctcatccctacgacagtctccttgttgttgctccgacactccaggctccacctcagaacctcgcatctgccgttctggtttcctggagcacccattaccccacacggcccgctgctcacttcctcacctcctccaggcctctgctcaaatagcacctgctagggaagcttccccctgcttcccaggttttgctggactccaaagctcttttcttcccagaggcaaagcccttggctggggtcctgggcccagcccggtgactcaggcggagaagatgctcccaggcctcccgctggatttggggcccagggtcagccatgggggtaggcggtacctaggctgtacctggcgcagaggcctctgcctgcccctgccgtgggaggcagccctgccctgcacacacgggcttccaggctgcgggtgggaaagccccacatcctcctctgcttacctgactccagctgactcagacccccagccctggccagaggggagccgcagctgctccgccccttgatgggaagcagagctgtggctgtgagggcctggctgggccagacactgactcacctctctctatcccgcccctgcgctgggagccacgcctccctctggccagaacctcttggccttctgctgtgggagctgccccaggcggagtcttcccgaggggtgccttcttctgcctctgggggcctttctgttccttcaaggcccagtttgagggccatctcctgctaggaaacatcaaatgccctctggccagaaggggaaaaggatatgggagaggtaaaataatgataataataccagcaacagtaatgaaaacaactgttatacaagaataatagcagctagccatgctcactgtgtgccaggcactgtgctaaacacttcacattttaactcattcaatcctcacaatagtcctatgaggtaggaactctcatttcccaaggcacagagtggtcagtatccagcccaaggctaccagccagccagtgggaggaagggatgtgaatctaggcagctggacattgagtcgcattctcacccccagctctgagaaccgagtggaggcccccgaggctggaacgcagggagctgggagggaggggagccaggtcctgggctctgttccagtgcccgtccccacagtgggattttaagtctccccaggcagaggccagccccctctctccaggggaagaacctcccagagggagggccctgccgcagcacaggctggtgcttgttccctccattggagtggagctcagagcagagggtctgggcagtctaccaacattgcccagccccaagtgatgccagcccctgctctgggcagccaccaaacaggaattcacacaggtagggcagggaccatggcgtgggcacttaacccattcaccctgccagccacactgtgaagtggggacagtacaaacatccgttttacagaggaggagactaaggctcagggtggcaggacttgctcaaggccacagaggcagaacatggtaggagcgaattcaaacccaggattgttctgatgccacacggtcagagtcccttctactgggtggtgacacagcatctcagtgaagaacagggcagggtgggaaggagacgcaggaaaaagcctggagcctcagttcacatcaccctctccctctggccttccactaacctgaactcaccagtccatcttttcattcctttacccatacctccacctacctactcatccacacattcatccgccatccaaacatctctccatctgtccttccattattccatctatcctttccatccaactctcagccatccctccacccatcaagacttccctccacctgtccttctattcatccacccatccattcttctattcctcctgccttctatctattcaaccttccattcatccatctgtccatcagttcaaatatcatctatccacctctccttccttccaacctccaatccatccatccaaccgtccgcccacccattcatccatccactcatccacccacacatccatccatccattcatccgcccacccacccactcatcctcacatccatctacacatccattcatccatacagcccacaaatgtctatttgaatgacagctgtgatgcccaagccttggggttgccgtgccttgagccaggagaaacatgcctaattaggtttctgtttatttgttgttccaagaaggctaattgtgggctttgtaaacagccctttgatggctgaggagttactttaggaggacagttaaataaacaatcactgggtagaaaacagttagtgctggtacacggcgggtccggagtcatggcctgccttacagaggaggggtgagactgagttccagacagtgcagagctttgagtcagagtgatgggaatgctggcagtaacagctcatctgtgttgggtgcctactgtgtgccagatgctgtgccaaggggccctcacagcaactccaggtgatggcaaccattatggcaccaatttatgggtagggagactgaggctggggaagaggaagctgtgtgtccaggttcgcatgtctgagaagtagcacagccatgacactgatctagacctgtctctgtgcaataataatgataataataacaaataattacatggtacttactatgtgcccggcactgttctaagagccttctttacctgtaccctatgaggtcagaactaaacatcatccctgttttacagatgagaaaactgaggttggagacatgaagcaacttgctgagaatttgtaaaaattaattatctgggcctaaagtcttactcttgatcatgttattcagtggaatgcactttctatgcatttaactcagatccagccatacatgatctgccagacagttttaaaaaaataattgttcttgtactttatatctctaaaaatactacaaaattataacttatgtgttttttattacttgctgctgaggttggtaaaatgtttctgtaaagagccagataataaatgttttaggatttgtgggccagaccctctttattgcaactacttaactctgccgtggtgcaggaaaacagccacagactgtatgtcagtgaatgtctgtgacagtgtgccaataaaactttatttacaaaaacaggtggtgggtcaggttgggctcaaaggctgtagcttgccagcccctgactttgcagtacgcatgtatttgtatttaccaaaccatgttctctgcccttttatgaatgagataaaagcttttcaagcatgatttcaaccaggccatttcacctccaggccatttgctcaccacatgccctatacactgtttagcagtttgcccactattggcaattttggaaggaatttgcaaattacttgaattaacctgatttcttcatttgcaatatcagtaaattaatgacacctgtgaggggcactcaacttggccgtcaccccagcagggacactgaggttgcttcactccaaatctgtaaactttaagcttgataaaaaaaattgaaaagtgaaagtgaggagttctgtggctggggttctattactgttttctattggtgacaagaacaaggaaatgaaaggatgatatgggaggggtattacaaaatgtactcagggctagtgggaagagaacggagtagtgtcagaaagatcccttttccccgttatccccaccttcttcccatcagtgttcatttcccaacctcagaaaagttgtgagcctgggtaaaacagtatgtggccactccagagttaaaagacaaatggtaacctaggtaaaaatatttgaaacataaatgtagacaatgaatttatttccacaatatataaagagttcctgcagaacaataagaaaaaaaccacaaacccactagaataatgggtagtggatgtgaataggcaatttacataaaatacagatggcaaataaacatgaaagatgttcaaccatgctggtaatcaggcaaatgcaaattaaaacaacaatgcgagaacatttcccatgcctcaggttgacatgaatgagattggtgatgtaaagtgttaaggagactgggaaacggtcacaccgatatactgccggtggcagtgtaaattgaaacagcctctccggaagacaattttcacagtagccagtaaaactgtaagttcacatttttgggggaaacactgcagttccttgatgtggcatctcccttagtgaaacatccacacacaggcacagggagtatggtcaagatggtcactgggagcaacctaaatatccatcagttgaggaagggttaaacaccctgcagtggtctgaggctccccatcttttgaagcacagtctgcacacctccatcactgatgttgaacctgctaggtgctcactcttccaagcatcccttgcagctagggggtggtcacgtgacccaggtgccaccgatcagacgtgctcactgagacctggaagcagggatagttcaggggcagcagagagggcccaccgatccagtgttgtgtgtgatttggggtactgtccctgctgaccttaagcctggttctgcaatcctcccaggctcctcaaatcccttattttattttgaactttcactgaagtatagcacacatagagaaaaatgcataggtcgtaagcgataacttcatgagccttcataagtgagtacacttgtgtaaccagcccttcatcaagaaacagaatattccagttcccttaagcttcccttaatgccctcttccagtcacgacttccccgaggctaaccaaggcgagttgtgtctatttctagtgctttatataaatggaatcaaatgatgtgtgcttgtttgtgtctggcctctttcccttaatgttcaagtctttgagattcacccatgctgttgagtgtggttgcagatctttcattctcattgttaggcaaaattccatagttggagcagtgtctgagtgtgtctctgttctttcattcattcttctactgatggacatttgggtactttctagttaggggagatttatgaatagggctgctatgaatatttatatgtgtccttcttggtgaaaatctgtctgcactactattgagtgtagtcctctcattgggtcttatggcaagtgtatgtttcaccttattaagttgccagtgtcttctgaagtgcttgcaccattttgcatttctaccagtcatgtatgagggttttttctaaatgctccgtattttcatccactcttggtattttccatatttttcattttagccattctagtgggtgtacagtggttatctcatcaaagttttcatttgcatttccctgctgagcaaggatgttgatcacctctgtgtgtttattgatcctttgggtatccccttttgtgaaatgcctactcgagtcttggccatttttgtttattggattgattgttcttcccctcataaagtactttgaatagactgcttctctgtttaaattactgtatcagccagggctttccagagaaacaaaacctaacaggatgcgtgtgtgtatatctatttatatttaattcaatttttaaagggattgactcatgcaattgtagaagctggcaaatgtgaaatttgtagggcaagccggcagactggggactcaggcaagacttctatgatacacacttaaggcagaattccttctaccaaaaacttggattttgctctcaaggccttgaactgattgaatgaggcccacacacattatcgagcccatctacaaaatatcttttatttttatttgtatttatttatttatttttttgagatggagtctcactctgttgcccaggttggaatgcagtggtgcaatctcagctccctgtaacccccacttcccgggttcaagtgattctcatgcctcagcctcccgagtagctgggattacaggcgtcccccaccatgccgggctaattttttggtgtttttagtagagatggggtttcgccatgttggccaggctggtctcgacttcctgactcaagtgatctgccttccttgacctcccaaagtgttgagattacaggtgtgagccaccatgcgtggctcagaatatcttttttttttttttttttttttttgagacagagtcttgctgggttgcccaggttggaatgcagtggtgcaatctcagctcactgcaacctccgcccctcaggttcaagtgattctcctgcctcagcctcccaagtagctgggactacaggtgcctgccaccatgcctggcaaattttttttttgtatttttagtagagatggggtttcactatgttggccaggttggtctcgaactcctgacctcatgatccgcccgccttggcctctcaaagtgctgggattacaggtgtaagccaccagcccagcacagaatatctttatagcaacatctagactcatgtttgaccaaacaactggacactgtaacctggtcaagttgacacgtaaaatttaactaccacaattacccagagctgtttatgttgctctcaactcttagctctatctaatctactgtgaacatacatgcacactcacacacatgcacacactaccaacaacagtggtagacatttcattgtaagtgcacagaagtaaatatggaaggatgctaaactcattacatgacccccttggggaatgtccaggatggacatcaaaggggattttaactacaagctgtaactgtaaaaaatatttttaagaatataataatgggttaattgtataattaaaattaatatttaagtggcaaaacttttaaaagaaaaccaaaggagtcgttaagtccccattattcattcagcaaatatttactgagcacctactttgcaatagttgttggagacactggataagacagatccagtctctatcttggtggagctgacatcatagtcgagaagacaggcaataaagaagcaaacagggaaatagcagatgatttcagaaagtgttcaggagtattctgaaagcaagcaagccatgtgcaggggcacagtatgaatggggacagggttatgttggtgtgggaagtcagggaaggcctccctgcagtgatatttgagctgagccctgaaagaggagaaggagctggaagagcacactgaaagaggacaaggagctggaagagtggggaccaactcggtacatgcaaaggtcctgtattagtccattctcacactgctaataaagacatacccaagatttggtaatttacaaagaaaaagaactttaatggacttacagttccacttataggtctggggaggcctcacaatcatggcagaaggtgaaggaggagaaaaggcacgtcttacatggtggcaggcaagagatcattgcaggggaactgccctttataaaaccatcagctctcttgagacttattcactatcatgagaaccgaatgggaaagacccaaccccatgattcaattacctcccacggaatccctcccactacacatggggattatgggagctacaaatcaagatgagatatggatggggacacagccaaatcatatcaggtcctgaggcaggaatggaccagatgagctgggatgagaacccaagcaagcttctgacttggaaaccgaggctcagagagggatacacacaactcaaggccacagcactggacgtggtataactgaacgagaatccagctgtgtgctggtgcagagctgcctgtacaggaaggaggcctctgagctgctcaaagggctctatctgcactcccccacagaaatccccttatgatcagagccaaacattggagacccagcccccaggcttgtgccagccttgccctgccagccaaggccagtatccccactgaggggcatctgagggctctgtacactttgcctctgagttgaggatcaatagaagctaccactgctgttttacctaattatataacagtggccagggaggaaggtgtcagggatagacgctttaccggcaccatcccatcaaatcctgctaagaactccatgaaggggtattattattcccattttgcagttgggaacactgagactcagagagatcaaatgccttgacttcagaatctgtatttttttttttttttgagacagggtctggctctgttgcccaggctggagtgcagtgacatgatctcagctcactgcaatctctacctcctgggctcaagccatcctcccacctcagcctcctgagtagctgggattacagatacataccacctaaccaggctaatttttgctttttttttttttttttttttttgtggagagggtgtttctccatgttgcccaggctggtctcaaactcctgagctcaagagatctgcctgcctcagcctcccaaagtgctaggattataggcatgagctactgcgcctgcccagagcctgcattctttacctttacagtctagaccctgctcctatagatccccaggaaagagcaagaccatcttttttaaatgccagagcctcagataggaaaggatgatctcacccaggacttcattatacagataagaagaccaaggtccaaagaaggagaggaaccatcctctgactatacagagctgggtctcctgctcccagagcccctccagctttaccccctgctcccctccccttccttccattcatgatgacctcactggtctctaggctgtcgctccaacatgctgagctcaatcctgcctcagggcccttgtacttattcccctgccagatctagcctatcatttcttgtcttcattgaccactccatctatagtggctctgcgtgttgctttcctacctaggtttatttttattcctagcatttatcaccttctgtcattatattacgtatttatatagtttctttttgtccactacctgcctagaatattagaaccatgagagcagagactttgttcacagctgtatccccagtgcccaacccagggcctggcctccatgatgctcaatatgtgcttgtgggatggatagatgggtggatgaatggatggatgaataaatgggtggagaaatggatgtatgatatgagggaggaagggtgggatagatggatgaatggatgggtagattaatgagtggatggatagatggatggatgaatgaatggatggatggatggatggatggatggatggatagatggttggatggatgtttggatggaggggtgggtggatagatgagtggatggatggatggatggatggatggatggatggatggatggacagctgaatggacggatagatggttggatggatatttggatggacgggtgggtggatagatgggtgggtggatggatggagggaatgaggagtggatagatggatgaatggatgggtagatgggtgggtggatgaatggatcaagggagtgagagagggaagggatggatggatagatggatagaagggtatactaatgggtggatgaaagggttgacggatggaaggaatgatgggcggatgggtgggtgagtggatgggtagatgggtgggtggatagatggtgggcggatggacatttctcccagcgtcgcttcccatccctgtgctgtgggtctctcacgtggctgccctgacttgcctcccctggccccaagcccgagcagggagctctgggggcttccacatgattgggcaggatttctatttctcaccctcctctgaggctgggcagacaaaagcctttgttcttcctccctgcctggccctgctccagccagggtgggaagttgctggcaagtcagcaacttaactttgctgcaactgaactgaactttgaggcgtaacctgtcaagcgagccccggaggcttctgcggtccacaggggaggggcatgatggaggcatggtggggagcaccatggccaggcacagagatgatccctatctgggtggacccccaagtctcccagagtagattcattttttgaagcaaggaggggaagctaatagatgaagctggctctgggctctctgtggacagctggggacggtgtttctttttgtcctccagagttgttctgcagggtgaggggtaagaaagggggccgctactaagtgctcacggtggtcctgtgagggggtgtcacggtcaccattgcacagaggggaaaactgaggctcaaagagactaagtaacacgcccccaggatcacccggctagagtatggaaggcaaggtatggacctggacagtgtggctcagataaaaatttctcatgtcccatgtcaccccgtcacacttggcataagagccacagttcttccctaacactgccttgctggatgaactcaggtaagcctctttccctctccgggtcttagtttctctcctctgtaaaatgagaggcttggctgggccctaatttagatattgcaggattctctgggttactgggatcactgggttcaacttccataataatatgaagtctcaaagaaattctcaaattctctcacagtcctgtggccacacccgggacccacaggcccattagacagagcagcaaactaagaccctgactggcaccatcatttcctccagagccctagagtgtgatgggatcgctgtgtctccgcctgaaccctgtctggagttccaggtgtccgctttcccccaaggctgggcactgcacgggagagagagtcagagaaagcagaatcttgggcaggcgctgctgacccattgggtgggaggtctaagaatcaaggctgcaggatgggggatgaggtgggggggcccttttctctggagtgggaccctcccttggaagccaaactgaatggtcaaccattactctgctgggctgtcactaaccactcaaaaccagtggccacttgccaatcttctgtctttgtccagggcagaattgaatcttgttcaaataaactcaaaggccaggtagttcactgaagcaatgactggagaatttggcactctccagcctgccagccctacccaaacatcctcaaggtatctgcataaccagctcattgccctgcctactccaaccagagaatgtgggaagaagcccaggacctctgtgcggtggtggaggcccgcttggctgctcctgacctgtgtctctggcctcttcagcctttcctccaaattccactctgtgcacaagctgctggtcacctccctgcacatgctgtgtggcttctggcctcgggacctctgcacatgcagtctcctccactgagttctcccagaaacaggccctcagacacgaatttgagtgcaaggagtatattttgggtggtgatctcaggaagcacccatagcaggttgggtaatcaaaatagggaagaaagaaaataaaataaatgttattaaaccaatcaccgctgtgggcaactagacctcagacccaccagggaactctgggagacagcgaagagcatgcgcttcagtcattccaacccagttgcaagggaagagatcatgtatcttccgacttcccccagtcgtgagctgcgggctaattccaggggctagttccaactctctggaacttctagctgagcgtgcacccatggccaaatgaaagcacttaagcagacatctgcagtgagcgagagtgggcatctgtctaggggacgcgggccgggcagcaacagcatctgctacaaatgtttcctggttcctgaccttttgcaacctgactcctacctactcttcaaagcccatctcagatgtcaccccctcggggaagccttccctgaccctcctaaatcagtcaatcacttcatgagtttctaatatctgcatgaatcacagtggattgtaattgcctgtcccacaggggagtgaacaacttaaggtcaaaggttttacatcttgggcgttaagaacatgcatgtcacgcagtcttgagttctgctctcctggcccctctgaacaaactgtggtctcctatctgtccccagggcctggttgttattgggccctcagtgaacgtccagataaagggattggaatggcaatttcagctcattgacttttcctctttcccctgaactttcctggtatttccatgatggatgttgtggttcagctaatgggtcccgattctaaatcctcttcagaatcactaggatagcatttaaaaaactttgggggctggagccccatccccctgagattcagattccgttactgggatcactggcttcacctttcataataatatgaagtctcaaagaaattcccaaattctcaaccggacaagggcatgcagggagtgagtttgtcatgaagtcctacggggagagggccagagggcaggcagcctggagtccatgctgggagacaaatgtggaggaagcagaaattagaaattaaaagaaatgaactggacatatgggcagccacatggttagagcttaaaaacaaacatagaaaaaagggaacatggtggagcaatgttttattacaatacgatgtaaatggctgagaaccacaatgagactgtgccgtccttaggaaggggctgtcagactcagctgcccactagatttgcctggtaacccttaaagattcctatgcccatgcctacccccaaagccactgcagtggaatctctggggcgagatccagtatttttaaaatgcgaagtctgggctgagaactgcagaacacgggagaacagctatctcaattctttgtcctcagaggggaattcatcctgtaataatgttacaagggtaaatggaaaaccaactatatgccaggcactgtgctcagagctttgcacacattacctacccttgtggggagagttcttttataatccctacttcatagatggggaaactgaggcacagagtggtgaagtcggtgaccaaggactcacagctattcagtagcagagcaggcttgtcctcagtacccggggctgcaagtctggcaaaggagtccttggcacctccctcctgtgtgctccaaaattgctctctctgacgccctttgactcacttggttcagcaaccgcaaggagttgttgtttcccataaattcctcatggtctttttttttttttttttttaaacctcagcgcacaggcaaaccccacatcatgaaggctgatcggcttttgaaggcgagaccttcattctaaaggtcacagctgtatgagccgtgtttattagagcttattttaaattgctccctcaaccctgtgaaaggcgggaagtcttaaaattacttctccccaaaactggcgccacccaaccctggaagttctctgacttgtttcataaggaattattaattatgatttgtttttataattgtccacttggagtcttggatgacacacgctcagacttgcccatccttttttaaaagaaggaatcaaaagttcatggaaatcagttatatttaatgagtggaattacttgggctcagtcctggattaactgtgtgaccttgggcaaaccccttccctctctgagcctctgtttttctagctgtaggaggaagagtgtggattaatatctctcataggatttagaatatgtatttcctgccagtcgccatggctcacgcctgttatcccagcactttgggaggccgaggtgggaggatcatttgaggccaggagtttgagagaagcctggccaacatggggaaaccctgtctctactaaaaatgcaaaacttagccaggcgtgttggcgcatgcctgtaatcctagctacttgggaggctgaggcacaggaatcatttgaacctgggaggcaaaagtttcagtgaaccgagatcatgtcactacactccagcctgggcaacagagcaagaccttgtctcaaaaaacaaacaaacaaacaaaatatgtatatgtgtgtgtgtgtgtgtatatatatatatatacacacacacacacacacacacacacatatgtatatttcccagaccataaatatgccaggggtatatgaagaggttttaagttgtacatggatggacattttataagttgtattttttatttcaattcttaaaatttcatagtattacaacatttcatttgtaaatgcagacatttcttattgttaggatggtcaatgaggaggaggagctctgcttcatgcagtcagtcactcaggaatctgacagatgggggctcagtcatctgcaacaggtagcttccaaggtctccctgaggatcaacatccagccagctgccagaagaggtgatagaggagaaacccatgctcaaccagctcagccgagaatgacgtacacatcagttcccctcacatttcactggatagaatttatcacatggttccacctagatgcaaaggcagttgggaaatgtagtctcctgggtgggtgactgcttacctacaacacttaggaggaggagtatgagtctttggtggatccttggtcatctctgtctcagtattctctttttatttttattttattttactttatttatttattttttgagacagaatcttgctctgactcccaggctggcatgcagatagtaccatctcagctcactgcaacctcagcctcctggtttaagcacttccccctgcctcaggctcctcagtagctgggattacagaggtgcaccaccagttaatttttgtgtttttagtagagacgaagtttcgccatgttggccaggctagtctcaaactcctgacctcaagtgatccacccaccctggccttccaaagtgctgggattacagacgtgagccaccacacctggccagtaagttggcagcagtgggattcaaacccatgcctctgaagagactggagtcttaatacagtgccttagaccgctcggccaccctacctccgtggaaaatattattctctctttaaataaataagttgaaggacagagatttgccacctcacttctcaatgaattaaaatacaatatacaattttctataggtgggagggctcatttgatgcaatgctaaggtttactgttcagctgtggtaatcaagacagtctggttggcagagggacagatgcatgcaacagtggaacagagtagagaacccaagaatagacacgcacaaatgtgcccaaaagatttttgacaaagatgcaaaagcagttcaatggaagataaaaagccttttcaacagatcgtgctggggcaatttgacatccacacgcaagaaacaaagcacattgacctaaacctcacacgttatacaaaacttcactcaaaatggatcatagacttaaagataaaacataaagctataaaacatttagaaaaaagcaggagaaaatcagtcttcagaatctaaggctaggcaaagaattactagatgtgaaaaccaaaagcacaattcataaaaggaaaaaaattgataaatcggacctcatcaaagttgaaaacttttaacccatgagaggcccaattaagaggaggaaaagacaagctacagattaggagaatatatttgcaaactgcatatctgacaaagaactagtacctagaattcttaaaacttgacggaattctcgagaactctcaaaagtcagcagttaaaaaaatccaaatagaaaatgagcaaaagacacaaacaaatatttcactgaaaagaacatgcagatggaaataaacacatgaaaaaatgttcaacatcattagccattagggaaatgcaaattaaggccacaatcggatattgctacacacctatcagaatgaccaaaataaaaaacgatgggaactttcgcattcaatcactggtgaggaatggagacactagaacactcatacattcctgatgggaatgtaaaacggtaccgtattctggaaaacagttttttaaaaactgccttatgacttggcagttgcaatcctggacataaaaatgaaaacttatgtttgtgcaaaaacttatgctcaaatcttcatagcagctctcttcataataggcaaaaactggtaaaccacccggaagcctgtctatggttttttttaactaaaaaaagctgtgttatatccatactatggactgctacttgcaatacaaaggaataaaatattgataacacacaatttgaataaatcttcagagaattatgctgagtgaaaaaaaccagtcctcaaaggttacataaactatatgattccatttatgtaacattcttgaaaccacacaattatagaaatggagaacagattagtggttgccatggctcgggggcagggttgggggtgggagatgggtttggttatacaagggcaatgagggatcctcgtggtgatagaaatgtctgtatcttgactatatcactgtcaatatctttattgtgactgttaacattgggggaaactggaaagggtatatggactctctctgtttatttcttacaactgcatgtaaatctataataatctcaaaagaatacattttaaaaagaatatattatacaattttctatacccagacactactaaatataattatatctttggtaacacagacacactgttctcagataacggaagtagtgcggtgattatgtgtgtgacttgacaatgggatgggctgggttcaaatctcagctaccagtcccttcacctccttgggcctcagtttccacacctgcaggtgctgagcaatgagaggaactgtctcgtggggttgctggggggacacgatgacgtgattcatgagacatgcagagcacaatgctcacttgcagtggctgcccagtaaatgaaattgccacttttccgggctgtagaaaaggctacaggtagaggcaggcagaggattggacccgagagcatcctctgagagctctagattgggatcatgtctcaccagccagggggtttgttttgacttctttcttgcagggaagtgtctgctgagtggtccattccactcccctgagtttggcctggtcgcttcttgtctgccctctggaccccggtgggtgcaaactttcatgggtgtctctccacctggagcctgtggttgggactgctcaggtggggacacagcctggggggtgatcctctgtaaggcaaaatggagcaggagtggaacccatgcctactgcatacctattgtgtgccttgtgacttacgtgctgcagctcacggaattctcccaacaactttgagcagtaggtgctataatcactcctgcgtgatccagagaaaaccgagacttggtgaggggaatggacttgtccaaggttgtgcaactagtaggtggcagagctgagatctgagccctggtctgtctgatttaaatccagaatcattttcactgttgataataacctcaccacttattaagtatctactagagtaatcaatatgctagctctttccattgaggtatgatcacctttccattttagagaagaggaaataggggttaggcaaggtgcattgccaagatggacaacagctctcaaaaaacagccaaccttgcagccaacgggcagctttcttgtgtgcccccaaccccacctgtagctccagcccagctcagccaagatcactcaagctttgggacttttaaatgctgagtcagcaaacagcccctaccttgagatactctgcctaggcagactgtggttgtttgcacttcagcttcaggcctccagggtcagctgagatagcaagaccttcccctgggggctggatggggtcattgggagccactgagagaccctttccccacttggcctggcagacagagtggcagttggaagaggctcgaggtggctgtggtggtaacaacttccttttgagtaataacatttactgaaaagcaattctgcttttagcaccagaagttcaccatccttgcaagcaggcgcctaagaataccttcattcaaccacagttcagagattcacagacttccttttgcactccctccaggagagtttcacatttggtgttgagggaaaaccaaataccacaattattggagggggtgggaggggtgttgagagggaggtgatgcgaaggaggccaggtggcatcaaccacagcccccaaggcctcacaggcagcctctgggcagcggctcagcctctcgccctcagttactggaaagacagcggacgagctcataatgaaaccgacaggctgacaatttatcttccttttacaagaaaaagaaagtgattgtccttcaaacaagcatgactttggaagccagggacttaccctggccactctgcaaattagagacagagccaggctgctccagaggccccgagcccctgcctgtcacccccaattagcgctggagttctttaggctcgttttttctattgcccaaaatccagtctactggggcataatggggacttatggaaagaaaaaaatccaatctgcacttgggaggggatagccttaaatgttaggcactcaccgcaggcagctgggggtggctgagggcaagggagaaggcatgggtggggaaggaggggatgtgccaggcagagccaggaggctccaaaaagcagctctaaaaagctctccccctcccagcaatccagcctcctgactcacgccagacacagaggcagctgatgggatgggaagaggctggctttgggagccacagggatgtgggggcaaactccagctctgccacttgctggctgtgtgaccttgggtgggtaacttcacctctctgagactcagtttcctcacctttaagatgaggatgagtataggaggtcaggacatgaccttcctgtgctcaaaaccctcccacggctcccacctcacttggcagaaagtcaaagatctctgtggcctaccaggccctacaagatctttcccatgcttcccttataacctcatctctctctctctgtctctttttttttttttttttttaagacagggtctcactttgtcacccaggctggagtgcagtggtgccaacacatctcactacagcctcaacctcctgggctcaagtcatcctctcacctcagcctcccagataggtaggactacagacacatgcctccacggccagctaatttttgtattttttgtagtagagatggggttttgccatgttgcccaggctggtctcgaactcctgagctcaagtgatctgcccaccttggccttccaaagtgcttgggattacaggtgtgagtcaccgcgcctggcccatctcctcttactcactctctctggttccctctacccctgccacactgggctcctctttgttcctccaacatgctaagcacacgcctacctcggggcttttgcacacactgtttccgctgccttcagcatccttcctccagatagccacagggcttcttccctctcctgatctgggtgtctgcttaaatgaccccgggggtcctgctctgacccccggcccttccaaattgctcccctggccttacctcttcaccctgcgtgaatgttttcccataacactgaccactacttgacacaataatttagggggttcataactccccattggccagactgtaagctcccagcaggcagaggccagttctccactgtcctccattaaatctcagagcctggcacatagggggcactcatccagcattgaatgaacagatgcagggttttgtggtgagaagggaagaaggacgtgtgtggcgggttcagcaccagcccagggtgcgtgctcactgtcacttcttctctcctctgcccagcaccagccccatgtcatgtgcttgttgaattcctacaatggaaggatgcattttacagatgcaggaatgagaccacagagcccaagcgactgtctcagcccgcagcggggcaaggctttgaattctggtctgcgggtctcttggcctccaggacaatggtgacagtgtccagtctgacttggggtctgggtgagagaaatggctggtggggccatcagactcttgagaagaggccctggctttgaggatctccagccgacatctgggcttaggactggggttcacgccccgtcctcctgtcccacagtcccacattctgccccaaagcagaatgcaagccccatcaaggaggctcagggtttccagagaggggcttcctcaactttctgttgctggaaagttctgtcccagaaagggcagacgcttgaggagctcctggatccggcagaaggctctgagactaggagacccctggtgtcctcgctccccggcaccccgccagttctcgaatacaagggactttccagagaagtcagcctcctggctgcctccaagcctgcccaggcctgcaggcccaggtctccatgaagctcagtcctgcctcggtttccctgtttttaatttcttggagaggccaaggagtttggaggtgaacagcctcatacgagcactaatttcccctaggcctggggcataggaattttggagccataaacaggcttctcacagcccccatgatgagtcctccccacactccatccaccctggactctgggctgagctgggcaaggagctggtctggggtgggctgggtgttgcctgtgggtgcggctcagagctgggggcgctacctctgcccttctgtcccccatcagagctgccccagctgtatgagaacccctcccacaatggctacaacagagggcacgcaagtgagacgccaggaagaactgcttcagcttcgttatcctcaaaggtgttcgtacccatcaagcctcctagagcagacctccatgacagctgcccatgggacaggtccactctggagatatgtttagtttggtccttaaagtatttttttttaatgtgaatcaattgccaacatctgacatgccaggagatttcacataaagtccttttctctggcttctcttgaaaaatgggaagatgtggccatactgggcccacattcctactggacacaggaggcctgggagtggggttgcgggaggccctttcttagtggcacatagtaggtactttcctgttcacccagtccctgcatgccccactttcctcatatcatttccttgccagggtcttgaagtatgagtaggagtgcgccagaaaagggcagtggaaaagcgttccagcaaaggggaacagcgtgagtcggtgagatgcatctgttcaagattcactcgacaaatatgtattgatacttactgtatacacagggacatacagcaagaaaccaaacaaatcaaaatctctgccctctggttctcagctagaggtggttttgttccccatgggacacttggttatgtctggagatgtgtgtggttgtcacagctgggtggagggagggtgctatcagcatctagtggggagaggccaaggaggctgctgaaccaatcctacaaagcccagggcagccttcaggtgcagaatgatctggccccaaatgtcagtcaagccaaggtcgagggaccctggtccgggggcacagacaccaaataggacaagccaatgaactcaaaccgtgaagccagcagctgatgagcactttcggattaaatgagccggagcatggtgagagggatgcagaggggtgtggctgctcaaacaggtgccgtctgcacaggggcaggtcctgaaaagattgtggcactgctggcagggtggccctggcattgtaggtgttcactgagtggcactttcttttttccaccctgcctaatcttcatgacgtccttgctgtggagcagggatctgtgttcctgaccgggcatcgcaagccgttaagaggctgacccagggctcctgaccactcagtcagtgtccttgtgctgcctggaggtagtgatggtctctgaattgcctcctgtcattcagtcagtcaacaaacatctaacaggagcccattggggcatagggggagggagcaacttagggtgaactgctcagcttacaacatgtggtaggtacgcaggaaagactggtgaaaggaatgaaaagaaagaataagtgaataagcaagcctcaggccattaagacaatgatcatggccagcattgattgagtgcctactgtgtggcaggctcatcctaaaccctccatgtgagagtcttacagaaggaacacctctgaaaggggggccaacgaccatccccactttcaaggtgagaagactgaggggaagagaggtgatgtcaactgcccgaggcctagcaagagaatggcaaggctgtcgccggagcctgggcctaccagatcccagggtgcacctgctgcctcagtgttgtgtatgctgtggctcaaatcgttatgccaccggccctgtgagggaggtgctagcattatcccatgttacagatgaggaaaccaagtctcagagacaggaagtgacttgcccaaggtcacacggcatgtgtgtttgaatctagatttcacgttttcagccaccaaaccctgcccctcgtaagccctggccgctctgtgaggaggatgcgtaagtcccaaggggttggggagggaaagtgggccagggagctaagccctccagggtctgcaggaccaggcaggaggctctgaaggaggcagggtccctggtgggcagatgggagcaggtgggcctggggagccgccagccttccgcccccacgtgcaggcatgcccgccaggagggcctgtggagaggccgccccgcggtgtgtgccaggctgacaatggctccttgtgtctgtgccgacggtgggagaggggaggtattgtttgccaggacaccttcccgccaaggctggctgcaggcggtccttgtcctaggacgcttggcacggggctgttccgggcgccagagggaagtgtgtgtgtgcatgtgtgtggctgggtgttctgggccacgttggtgctggctgcggctccctgggtgtgcctgtgcacgtgtgtgtggggtgagggcatgtgtgtctatctgagtgtgcccatgcacgtcttgcacacccatggccagtgtgtctgaatagtcttgtggcttggggcttccatgtgtctccctgggcgtggctgtggctgtgactttacgtctggcaccgtgtgtctctctgtacctctggaccacgtgtggctctgagcacctttggtttgcgtgcccatgtatgtctcagcctgtccctctgcttgtgtctccatctccctcggggtctgtctgtggagcatcttgatcccaagggggcaagaaagcctctgtttcagagtgcgggctgagttccattcgtggctgataggtgagggagggggcttcaggcagagggaatggtgggtgcccaagctggggggcaggatggagttggcagatctgcaagagcagccaggaggctgggtggccgcagtgaagtgagtggaggtgagaggacaccaggggccacctgcaggccagagtccaaagtgaggggcagccatcagaggatctggatgggaccatgacatggtctgtttcatggcaacgcctttggctgcaggtgaaaaatgggttgtagggcaagcctgagaggtgttgggagtcgctgtggccagtgttaggaagcagttccacagcgccacctcaaggaacccccactccatggcaggggttgcaacttccccattttgcagaggtggaaactgaggcccagggaggagaaatgcctcccaaggcctgcagcctgggagctggcccaatgctaaagccaaccctccacctcctccatcttggctgcctgctcctctgcaagtcgctctgcatcttgaggctctggtgacgcctgtgctaaagtcagagaacctggagtcctcgtcaggtcaggaaccaggactctggagccagatgacttgggttcgaatcctgcctctgtagctgtgtgaccttgggcaaatcacttagcctctctgcaccccagtgacctcattggccaaatgggagtgcttgttcatcattacctccaaagtgctgtgccactagatcccacctgtgacagccgcatctcctatccctgctttatttttctccaaaacactcatcaccttctagcatactacatcttgtatttacttccgatgacactggagtgtccgttccacggcattttgggttttttgttcatgagtagtgtctagaacagggtcctgcacatagttggtgctcaggactattttgttgcaagaaccaggtaatacatgtgacatatgggaacacagcctggcacgtagtgggtggaatggaggtgtctgctgttgtcattaagttgggagtaggcacttggaagcaggacagcccagtcaatcctgattaggaatgggtgtcccatctccttttctgcacatccttcttgccttcaggacctgctcagcccactctgggccagacatcttttatattggtctctgaaaatagggagactctggcaggtgctatgagctgctggtttcaagccttatgagggatcagtgacccggtttccccacctgaccacagctgatccagaggcttcgatggtctctgctctctcaggactctcctctgtatattcccctatatatatattccccctgaccaccccactgccccagatcttcccagtccctctgtcggtaaatacagttggcagctctggcaaaaatgtcctgccaatggtacaacgagtcgttggtgaatatttaggaagcccagcgggtttgtcaaggaagcagcttcctgagcataaatatttctaagaaagaatgaaaggaggggcctcggcctcagagatcagtgggtggtgtgctgacctcccaaggtcatcatgtccagtcctctgctgcatggtcattgcttctggtgtcccattggcacctggcatcctggtttcctgagaagggtcaggagctgcagggggaatccaggcccaggcggagaacaacctgctctgtcctctcacttccttcctgcttttcttccagactcccatccctggctgggacatgctgcagttgtcagcagctgcacaggagaagcaggttgggggctgaccagggtagccatggcttccttgaggacccactgtggtgtgggggctttgctcagcgtaactggataaacttggtatcggccctcccctcctgcagctgccaaggttcaggcctcttctcccattcctctctccaccccacatttattgagcacctactatgtgcccagccctcggagacaatgaaaagacctctgccctacctttgccctggttctgatgtccagtatctgtcctgggacagttgtgacagctgctcaattgtccctttcagtctctccctgtcccagcccttccccttccacaacggctgagttcatcttcagaaagtgcaactccagatcttgcttctgctctgctctaaaaccatcaatggctccccgctgcgacctggagaaagtccaaacggcccggctgggtgagcctggtcctgctccatctaccccaactgccctctgcagcttcgttccccacgtcgccagccacgaggatgacccctagtttttcgaacacacctggcccctcccacctccttacccttgctcaagccattcctgccagcccagtgccctttctcagccaacctctcgtgtctgtagccttttgtttgtttctttctttcaggacacatcacacagtgctttgaattgcacttatttatatcttcttttcctcccagagggcaggaagttgccagattcatttctgggcttggcgccaggctcaaagtaggtccttgttagattcgctggctgagctggtgaggatgctgtatttgcgcgggtctggggccacccagcacatgtgtcccttcttctggagaccacgttgagtttcccctgtggtgcctccacccccttggtcttgtgaattaggagagttgaccccatccatcctcagggctgcaggcctggccagtcaggcccctggccacatggattggttcaggggtaagcacacgatccaatcagggccaagaaattaaaccggcgactttggaatgggaaagacgttgccgccttgaggtggctgagctcgttgtaggatgtcagcctggagcagctgaggcactgtgccaccctgagaaacagagaccgcctgagaatgccagtgacatggggcaaagcagagccaagaggcgcagacagcccccagacgaaaatcgtcagcggtgctcctggatccagctgtatctgaagcagacatggctctctcattctccctttttaaaacccaccttgggttgggtttccattgcctgcagctacaagaaatcctgacaaatagctgagccttctgaatatacatctcatcaccttactgtccgcactgccatgaccccatgcgaaattctctcatgaggaacccctttgaatatccaaagctgggggaggcgtctcttcctccacagagctagtttcttttctcactcatgggcaatatgagcaatgatcgctggttctggttgcctcaagctccttttggaataaggaaaagagcaagtggaataacctaaaggactaaaatgggctcgagttcccaggggctaaggctgggccctcagccccactactgttcagcatggacaggcacacagcagatgcttctcggccattcactgcttgacagtgcaaggcaagctttctcaacctgggccctcgggcattctggactggctgcttctctgtgaaatacgccaggtttggttaggagcgagttgcccagtctgtgttctactgacatttagtgccaaataactcctggttgggggctgtcccatgcattgcaggacttgtttagcagtgtccctggcctcactacccgctagatgccagtagcacctccttccctgagttgtgacagccacacatatctccagacgttgccaaacattccttgcagggcaaaatcaccccctggttgagaatatctgctgtaagcaaagtgtgtctcacaggacctggcacatagcaagtgctcaataaatatcagcaaagatggttcggtgacgatgatgctaaagatgatcactgaggaaatttggggcctcagtgagatccagatttggctgacttaagtgggaaggaaatttattagaggaacatgagtgagcttacagaatttatgagaaagcggaagagtcagttcaaaacaacccagaaacggaggcagttcagtaggtcccgacagcaagaagcagatatgctgatagcggcaatgagctattcccgtttcagccatccccccacttcctccttcctaacagaacctattttgctcattttgcacaagaaatccctgcccccacccctcccatgggctccaggaagatgggcctcagccaagcctcaggggactgattcccgttgctctaagtcagccacagtgtcccccaccccaacaaggccagtgattgatttaggctggacatggaatgtgattttagccaatgagatgtgttgagaaatttgttagaggcttctgggaaaggtttccttgctcttcgagatagaggtttatttcactttgtataatccaggttttcttctttttgaaggctgaataatgttctgtggtttttttttttttttttttttttttttttttgagacagtttcgctcttgttgcccaggctggagtgcaatggcgcgatcttggctcactgcaacctctacctcccgggttcaagcaggccccatatgtgtggcctgtgcagaaagagactggcagcctggaggggtgagacctgggtggaaatgaagaattcaaccaaagcaagtaaagaaactgccagaagcttgagcccccgagaagctcccgatgtctgggggtaatcccaggatctccatctttttttttttttgagacggagtttcgctcttgttgcccaggctagagtgcaatggcacgatctcggctcactgcaacctctgcctcccgggttcaagcaattctcatgtctcagcctcctgagtagctgggactacaggcgtctgccaccacacccagctaatttttgtatttttagtggagacgaggtttcaccgtgttggacaggctggtctcaaactcctgacctcaaatgatccaccggcctcagcctcccaaagtgctgggattacaggcgtgagccaccacacccggccggatctccatcttttaaaaaacatgactttcttctctgggcaggtgggaggctgagggacacctcagcgttaagccaaaaacagccgaggcagcattcatgcctcctccttccaaaggcccccatgtctccaggggttgggagcctccagctctaggctgcggggatcccctctgccattcaggcccagcccctctacactgggccctgagcatgtacctggctcccccagtgtacccgagggccttgctgtcaccggatggattgagcaactcaaccgagtgtgcattttccagctcaggctaaccaccattcagtcacttcccctcacgttcatagaccagttggttccttgtcatttctcaggggacaccatgacccttcttgtgaactctccatgatgcaggcgagaatctgagtcacccagagctagcaacctgattcacctttgtcccccaaacccctggcctggctctcagatgaaaacaaataataataataataatgaatatagccactaattcctacagtgtcctgagagctttacaggtacctgcactgactttcaggtaggtacatgcttgtccccatttcctagatgaggagactgagtcccagagaaggtgagtaacttgcttataagggaagaaggagtcgtgatctgaagctaagcaatagggtggatacattcaagcatgtttggttagacatttagcaaaacacctttgctgaaaaaaaagttttgaaaaaaagttatgaaaaaaaaagattggaaactctatttttaaatgtatcaccagcttgggaggccaaggtgggcggatcacctgaggtcaggaattcgagaccagcctggccaacatggtgaaaccccgtctctactaaaaatacaaaaaaaaaaaaaaaaaattagccaggcgtggtggcagacacctgtaatcccagttactccagaggctgaagcaggagaatcacttgtacccaggagatggaggttgcggtgagctgagatcacaccattgcactccagcctgggcaagaagagtgaaactccgtctcaaaaaaataaaaataaaaataaataaatgtatcaccagctccatccattcatcagacacatgtttccatagtagataccttgtgcctggaaggttcttcttacgagggacatgggagtgaacaaacaggtaaggtcccctcccccctggaacttgtagtccagtgaacacaatcaatccatttaggacttgaacatttgaaattgagacttccctgtacctataattatcagaactgtatgagatcctgaggtggaaagatggtgacttctgtgggcttttttgctcaaacacaattctttaagaaagagacctgcatctcgggctgcccaccgcagtgtgaggatgtgagaaagacccagggacctcacagaccatgtgatgtcacagaaggcacaggactgccaggtgcagtgggtcacactgtaatcccagcactttgggaggcaaacatgggggtgtcgcttgaggtcaggagttcaagaccagcctgagcaacacagcaagactctgtctctgcaaaaaaccaaaaaccaaaaccacagggcggggaggtcagaccagctgcctggaatcccagcccagaccctcaccagcatgtgacccaggacgggccacgtgctgtctcctcaggaagcctcaattttctcatctggagacagggacaatgaatcccttccaggatcactgtgaaaagacaggttgagcatctctaattcgcaaatctgaaatccgaaatgctcccaaatctgaaactttctgagtgcggacctgatgccgtaagtgaaagcccgcggttttctgttgtcgctgttgtttcacggctgagccccctatctgctgatatcgctgttctgcttggtcgccctgaactccttattttcccactgtattaatgctatgtcatactttttaccatggagtacttatgtgtgagtaagtgtgagacaatgattgcttattgatagcatataaattcagagtcaggaataagggtgatgccaaacaaccacagattgtccacgtgggtaactgagataggtgtgggacgcctttctttctgttggtgcgatgcacacaaaatttgtttcatgcacaaaattattaaaaattatgtacaattgcattcaggctgtgtgtataaggtttgtatgaaacataagtaaaggtcatgttcagatttgggtcccatccctaagatatctcattgtgtatatgcaaatattccaaaatttggaaaatataaaaatccaaaagacttctggtcctaagcattttggataagggatcccttagacggtaccctgtgtcaatgtgggatatactatgtaggaaaatgtattcgtggttcaacccccagtcggcctgagggaaagtcgattccagaaaggccaagtgatgaaagttcttcatctttgtggacctcatctgggctcaaacacatattacagacctcagtgtcaaaggagccctgaagtcccttcaacaagggttggctgggtgaggactgtggcggcctggagggtagctgcgactcagcctccacggggaacgcatcccagtcatgccaaaaagccatcttcctcaagagaagccagagatccagattttgatagaaactctcccaatttttaggccaggcgcagtggctcacacctgccagcactttcggaggctaaggcgggcagatcacctgcggtcaggagttcaagaccagcctagccaacacggtgaaaccctgtctctactaaaaatacaaaaaaaaaaaaaaaaattagccaggtgtggtggcctgtgatcccagctattcgggaggctgaggcaggggaatcccttgaatccaggaggcagaggttgcagtgagctgagatcatgccactgcactcctgcctggacaacagagagagactgagtctcaaaaaaataaaaataaaaaaataagaaactgtcccagtttttaaacgtttgccactaatgacggcaaagcattggcctgccaccttgcaccttctgggatggcaaatgatcaaaaacacagacactagcaaatgttggtgggggtgtgagcagctagaactctcatatcttgctggcgggattgtaaagaggtacagccgatttggaaaacagtccagcagttccccaaaagtgtagattgagttaccacatgacccagacattccacttctaggtatatacccaagagatacagaagtatatgtctgcgcaaaaacttacacacaaatgttcacagcagcacaattcattacagctgcacagtgaaaacagctccaatggccatcactggatgaatgggtgaaccccatgtggtgggtccatacaatgggatattagttggcaataaaaataatgaacgacaaactcatgctacagtgtgaatgaacctcgaaaacgtggtgctgagtgaaagaagccagacacaaaaggccacatagggcacgattccattcctaggaaatgcccagaagtggcagatctgtagaaacagcaagtagattggtggtttggggaggctgggatgagggcatatggggagtaggcatgggatacggggcgttttggggaggtggtgaaaatgttctaaaattgattgtggtgatggttgcacaactctgtgaatgtacttaaaaccattgaattgtacatttttacagcgcgaattttatggtaggtgaattatattttgatagagctgttaaaatacaaaagtgctggcctaacagagccccttggtgggttagagtcaaccactggccacgctttttccattccttgattccagaggttatcctcagttatccggaaacttcagccacctggaacaccggttcctgcgcatgaggcgggactgtcccagaaggcagagtttccccatggggcccagcagtgacagagaaacaccctggaatgggaggtgaggggtgttgctgctgacacttgcctttttgcttttttgtaaaaatcagccattaaatgtaggcagagaaaggctctgtaggtaacttctagccccagacaagaaggaagtggagtgggtgagctggtgggaaaacagtggtgggcagaggccaggtgaggccgtgcagatcctgggtggcctgagaggaggttcagcaggacaagcgctgacctgaacgctggctggttttgccccttcgcccatcagccagtggcttagcagctactgcatgtcaggcactgtgctgggtggtgggagaatgtcacatgggagcgtcttaggaacatccacacaggggaaggagctggagagaatctgggaagacctctccggggaggtgacatttcagctgagacttgaatgaagtgacatccggggcaggggatctgcgtgggggacaggaactgcaagtgcacaggctgtagcgtgcctggccccagagaaagaggctgcggagctgcagccaaggggaagagggagacagggtcggttaggaggtcagggaaaccacgagggaggtcccagaccaggcagggccttgcgggctgttgtgaggactttgactttgctctaaaagagctgggagccatgcaaagctctgagcagagagtcctgacctgacctcggttctaatagtagccctccagcccaaggggagaatgggttggggtaggggcggagcagggaggccaggtgactgcgggaggccagaggggagcagggaacaatggctggtccagggtggtgcaggatgaggtgggagaagatagtcgttgttttctctcactgcacaatgtacctgctgtgcagagatacagggcaggtgaaaccggagattccacacatatattagacacacacacgcacacacacatacactctcatatatgtcctgtgtagatatggatcctatgcacatatttcacacacactcatatatgtccacatagatgtagattctatatgtatattatacacacacatatatattctaccttcatataggttctacacatatattacacacatttatattttgcatacatatagatttggcacatatattagacacacattcgatattcatatagattacctatagaatacctacttatttgcattctatttgtatgtgtggattcgagacatattatacacacacatatagactgcatacatagagatttgacacatgtactatacacacacactcatagactctacatacacatagatttgtcacacatattataaaccaagttgaccctgagttctggcagccagggtctgtgaacttggctcttggaaggggctcagctctggagttagggagtgcaggatctgctgcttagagctgtgggattcaggctttgcttctctgaacctcattttcctcatctttaaaatgggatgacaatacctgccttgcagggttgttgggaagtcttggtgagatcaccatttatgcaaagcagctgatctgctcgggaagactatttaatagcagtcatcacactaataacgaggtgtgttttggggccaagcaaaccccacggagcaccttcctggaacacaggtgtgcaccacgcctacacgccctctctcctgctcagccagaatgggaaaaggagtaggcctggggcctctgtttgggaaggatggaccaagaactccaatggaaacctatgagtcagcaacaggcataaaacagttaatgggtgcgccgcttcagctacagtaatgatggggagatggaagcctagataacatccagaaggcaggtggattagtcagggctgtctcagttgcaaggaacaaaaatccaactaaaaccagtttaggtgaaagataatttattgggtcacataaaaaaattccagggaggcttgcttcaggcatagctagatccaggtgtttgaatgatattgttttccacgtctctctggaagactgagttaatcaatatatatgaagcaccaactaccacacctaatgctcagtaaatactagctatcattttattactacaactgctgctgctactgccactgtgactacgactcccactgatactaatatgaccctatcagcccagcgacccagagggaagctccagcactctttctcaaccattcctatcaaagcccccagactggctctcattggctgtgactggatcatgtggccatctctcaccctgccccgtggcccatggccaggtcctcagtcacaacgacatccttgaagctgggggtgggtcagctttgctcaaactccatggactgagagtgatagagcgagactccttaatggaatatcagaaagacagagagtggagactggccaggtccagccatccttcatgtgggccctggcggggccatctctgctgcctgcctgtcccccacatggaggttggctgtgcctgtccagtcatcctcttacatgctaggtagtctcccatccttcccatcacttgggagtcctgaggcctagaattttccacaatgttactttcattgcacaagaggcctctggagttgaacggacttaggtttgatactcagtttcattgcttagttagcttcacctccctgtgcctcagtttcccccatttgtgaaatgtggataatgattctcacttccttaattcagcagatattttatggaacactatttctggtacttagtggctaccacctgctttaacactttcattttgactcgcaacaaccctgagagttcaatataaccatccatttttacacatgaggaaactgaggcacagagaggcacagtcacttgtccaaggtcccctaccaagaaggagaggcagagctgggatttgaacccaggggtgatcaagctcaatggctgtccatgtcgcccgtgcttcacctgaggaggctggcgaggtgtatcctctttcacctgcctcagttttcctcatctgtgaaacggcctcatggctttggagcaaacagaatgacagataaaagggacaaatgacacagggctctccatttgtttaacaagtacttattgagaacctactgtgtgcagggcaccaagccaggctgtggagaaaacagaagcgggtgacaggatgggagaggttccagaagccgctaggaggagaaggcagttgagctgtgacctggggcaggtggatgggcctccctgggaagatctgggtgtgggaagcgcctgccaggcagggggcacctcaagtgcaaaggccctgaggtgtggacaggtgagagaagaccaggacaagccccgctgttgccgtcgtctggaaaccaaggcacaaagagaggaggggacggagccaaggccacgcagctggcagaggtggagctgggatgttaggggaggaacagaggtcacgacctctgcaagcttcatcccccacccctcacccccagccagaatcttccagaggggtggcctccccttcctgagccaccccagctgttgcggaggctgctgctgtcctggttcccttgtttaattacaaacaacatttttcgccctcacttaattatgcaacagacgcccgtggatctgccaccatctggccccactttctggcttgagacgacgagtcgcagtgacttcgagggctgagaggggagcaagcgggaggcacctcggccaggagggcaccgagcttggcatggcctcagctctgtgatgtacctggccacatctctgagtcctcatctgcagaattgggacaattgagggctggcgcaagggtctgtgagacaagagctgcttggcaaagaggagccctcagccctaaagggggcctcgaggggccaggatgccatccccgggaggcagagttagcccctcctgtgtctcaaaagtagagtagagagggttcaattccaccttccggcaagctgcgtgggcagcagagttcccattccgcagatgggaagaatgaggctccaagaggctcagggacttgcctgaggccctggcatctgagtgtgggagtgggttcatggctccaaagtcctccatttccacatgagtgtcttgcaaactgcaatttttcttgggctgtcagttatgaggggaacagccctcccctggtttatcccccgggagcttggtgtggggctctgtgtgtggccctgcgtcagctatgaagtcctggttgatttgaagccaaaactggcccttccagctggggaggggagcaagtgtgaattattttcaatgccctaattaataataatagtaatattcactgacaattactaaatactgactatgcaccaggtactttccatgaattatctcattttcaaatgatcaccagccttctgagggaggcgctgctgtgcccaccccaccggtgaggagcccaaggcactgaacacggggttgcgtaggtaggattcgaacccaggccctgcagacagcagagactggcgctgctgagagtcgactgtggaacacggggctttttctggctctgtccttttctggcctttctttaagaggcagcaccagcagctggattccactttgagttgcagtgtgtcctggggttggaactctgggaaaatcccaacagcaagcatcccgggctgcctcctgcaggtgcatgggttgaagacatctatgcagaggctggacttgtccaggaaggggtgggaggcatagatatcagggccttcggccccccaggagccatgaggtgcaaagagatgcctgcaaggccccttgcctaggctgcctcgccagctagaagcttctgagccactctccagtcctctgcttatcattcccatcaaactcatgagctgggcctggcggacacaccccctcaacacctcactccagctcctggcctgacctggccccagcctcgcctcctcctcatctccctgcaccgccctcacccctaggatccattctccacacaggattagggggagcctgctaggacccaaggctgacagtgcccctcccttggtgaaacacttttgagggctccccactgctcttggactaaccccctaagtcttgttgcagcctccgtggccttgcatggtgtctctcagtaatctctgcacttgccggcctcccctctgtctccagaacctactcagacagtttccacctcaggacctttgcattctctgtgccctttgcctcgacttctctgccactggatcatacagccgtatcatcctagtccacactgtggccagagcaagcttcctgaaccctgcatctcagcaggtcctctgctgcctaagtcttctcttgggctgaacaccccatccccaaatccaaagccctggatggggctgaggctgcctgcgccccctccagcctcctctcctgagcttcttttagtgcccccaaaggcctgcctttgtgccagggtttctcagcctcgggctggaccattctccattgcagggctgtcctgtgctctgaaggacactaagcagcgtccaaggccttggtccactggatgccagcagcaccttccccagttgtgaaaactaacatctccagaccaccaaatgttcccggggagaacaaaatcaccgcagtcgggaccccctgggcgaggcttttgtccctgctgtgctctcttttggggacactccccaccagccctctgcacccaccctgctcagccctctgtgtatttcacaacccttagatgccacctgcgaggaaccttcccagcccaggcaggtcaggaggcttctgggtgctcccacaatgccttatactcatcatcggagacctgatgatgccatcttgtaattgtcagggggcatgttggcccacccctcaccccgcccctggggatgtcagctccacaagggcgggctccatgtctgctctgtcctccaccgcgtgacacgcacaagcaccgagcacagggcctggcgcgaaggggatgctcagttcacatttcaccatctctccacttgtctctgcctctgtcctcattcatcacaaacacaccccaagtccacacatgtgtgggtgccgcgagtgctgacaagaatcagacgtggttcctgccctcagcccactcacactagcgggcaacacaacacagtaggggagccacaggggacctggcagctccaaagaggcatctgatccaaactatggggaagaagggagggtcaagatgggcttcctgggggaggtgacgtctggatgactgaaaggatgaaaaggaggatcagcaaaaatagtgccaggatacggggtacccaacgtagtgaatgtcctaaatgccactgacttgttcactttaaaatgtttaatcgcatgtcacatgaatttcacctcaattattacaaataaaaaaatagtgcaaatagagggactagaatgtgtaaatgtctggtggacagaaactgaaggtcatttcactggagctgcaggtcaaaggagcagatattggaagtggtgatgagacaggagagctggccaggggccctgtggccacagagaggagtctgggctttttcttgagtgagtgggagtcacagaaggtcgtaggcagaggaaggaatgtggagaagagagtgggtgaggctggaagcaggaagagcagagaaggggcgatggccacagtccacgggtgagagggaggagcctggcccagggcttggccagggaggtgaggagatgtggttggatataggagatatttagggcataaacccgacagttacgatggtgtagatgtggaaggtgagaggggagcatcacggacaatgtccgtgttgcctcagtcaggaacccatccaggacctgcccccatgtcccccaagagccttctatgcgggggcaggtgcagggacccagctctgtgcttccctcctcaggggctctgcctcccccaaggctctgtaaggggtggtcttggcactcccatgaccttctgtgtgacctctggctaatctcttggcctctctgggcctgtttctggggcatctttgtctactcttccgggaggagtgagaggcactccgcccaggcagaggaccttgaagaacctgtcctgcagggtgaggccctcacccgcccctcctggggtactcagcaggtgaggggacacctggtgcacagcctgggcaagagacccagctccaccacgccctgcacggctgactggcctctgctcacctgagggacgctggggtccaatcctccaatcccaggggctgtgcccccaggcccagcctgggattctgagcctcacactctggccaggcctgggggatgaacaccctccgtcagcagcctggggtcaagggcatgagggctggagccagggccttggggcaaatcccagctctgccccttcctgctgagctgccttacgcaagtgactcaacctctctgatgcccaaagaaagagatctgtcatggaggctacatcccacacaagtggggcttttccacacggggtgggtatgagtcccggttcacacactggcactgtggagtttctttgtgttttcacaaatggaactgattttccatcttgtgtcgtggttatgccaggctggaggaggcttcatctgacggtgattcccaccctcgccaccaccccactccacttttcctgggaaggctctgggtcccctggcctttcatgaggccaaggtgttggggataggaatgaggacagaggcactggtgttgggtgtcgtcttcccaccaggcattgcctgacacaggctggtcccccccctgaggccctgcgtggttctgtgcctgccccttctccattgcccctggtcctgggggtcatttggctgcttcctggctacttcaagggctggttggaggctgcctttccagaatcctggaaaagctgcttctacctgaggttctgggcctcactgggctcagccccaggctgggggccacccctgacaccccgtctctgtacctatcctgcgaccctggctctgattctgggtgggggaaccttgctctctgcaagacgtgagttcttcctgctcttctcaacttttgaaactcaaaagccaggaagcctcctgggatccccgtacttggtgtccccgcccttcccggaggcactgagtacagacttacagtggggaaggacggaagggagaaaggaagagagcaggggcctaggtgggtgcagggcagggaagagaggccagttctgcagcctccccagacagtggccctcgggatccctttacattttaaaaaactgctgagaaccccaaggagctcttcttgcttgtgtggattctatcagtcgatactcacgttagaaatgaaaactaagaaatgtataacatatttatttattcactcaaatgtaataataaatccattacatgaacataacattttttataataaatacctatgcattttaaaatggacaaatttaatgagaaaagtggcatttgttggattgtggatatttctgcatctctctgtaacagctggcctctgggggacagcgggtcctcacacttgcttctgcagtggatctgctgtgagactttgtttaggatgaagtacctgagaaaacctggcttccaaaggcacatcgttggaaaaagggaggatattgtcacattgtgaaatacatgtatattgagacggagtctcactctgtcgcccaggctggagtgcagtggcgtaatctaggctcactgcagcctccggctcctgggttcaagtgattctcctgcctcagcctcccgagtagctgggattacagacatctgctgccatgcccggctaattttggtatttttagtagaaatggagtttcaccatgttggccaggctggtctctaactcccgacctcaggtgatttgcctgcctcggcctcccagagtgctgggattacacgcatgagccactacacccagccatgaatagtctttaatgctacacaaaaactaatcagtggtaatgtcttaaattcagatgcaatgtggaatctaaacatctatcaatgaacttttcaaactctttacactcatgtgagaatgagagtaaacagggcaaataatcctacgaaccccttaatgggtcttggggacccctagggatcttcggaccacacttttagaactgttgtgttctctacaatggacacgaactcatcattttttatggctgcatagtattccatggtgtatatgtgccacattttcttaatccagtctatcattgttggacatttgggttggttccaagtcttcgctattgtgaatagtgccgcaataaacatacgtgtgcatgtgtctttatagcagcatgatttataatcctttgggtatatacccagtaatgggattgctgggtcaaacggtatttctagggacatggatgaagctggaaaccatcattctcagcaaactatcgcaaggacaaaaaaccaaacaccgcatgttctcactcataggtgggaattgaacagtgagaacacatggacacaggaaggggaacatcacacatcaggcctgttgtgaggtggggggagtggggagggatagcatttggaggtatacctaatgttaaatgatgagttactgggtgcagcacaccaacatggcacatgtatacatatgtaactaacctgcacgttgtgcacatgtaccctaaaacttaaagtacaataataaaaaaaaaaaagaactgttgtgttctcaaagagaagtatcccagcagtcagaaagctgctggttgacccccaccagggacataccagggtatgatgaagaatgcaggttcaattcccatttctgctgcttcctggctgtgtgtctctggggaggtcactgcttctctaagtctcaatgtcttcatttctaaaacggtgataagaagacctaccttacaggcttgtggtcaggacccatgaaaagcaggatgtgaatgcaaagcccttgctcatatgtgttcctttctgccacagggcctttgcgcgggctgttccctccatctgaaaccccttccctcccggttttgccaagggaactcctttccctttagctcttggcttaagtgcttcttcctccaagaagccttccctgacttccctggaacgtctgttagaaacccctagagcatgatcaaagctttatatttttcagggttataggtgattatctgtctcccaccaatccctaagcctgggttgacttttgccctctgccgtaggagcttgtgtggaatgaatgctgttgaaagaatattggtgataaagtgccatctttgctgatatcttggtttttccatccttggaatgaaaaagctgggctttgacaaggggtccctccccaacccccaccttctctgccagcagctggactgcaccaagcaggggcaggtggaggggggctcatgctctgaagctgcaggggttctctcgggggacccagccctgcctgagccccctttatgtggggtaccccggaggcctctggggtcatgctccccatctcgcagctctttcctttctgcacatggtacctgccctgccctagagcaatctctcaagcatccaggctggcagacgcccttctccctcccctactctcccttcagatgggctcagtcaaggatttcttctctgcaaccccaagccgactgtatctctgtgtccctgccatcatggcacatatcccataccctcatcttccccaaccaggcagcacgttcctcaaaggccaggattgtgtcttcatcatcttcgtccccctgggatcagacagtgggcctggtgtccagtaagtgtccaatacatatttgctaaaatgacacgaatgcaggactctgggagaggttcctcttatcgaaggaggttgtacaagttagctttgggctgcaaggaatagaaactcagctcacactgatttaaagcataaaaggcacttactggcttgtattaatgaaaagcctagtagaagggtgagcttcagggttggtttgatcagagcttcaactcttttcctctgcgatttacccagttctgcttccgtgtgttgtttttgtttgtttgtttgtttgtttgtttcctctggctggttttcttcacggcgttgaaacaagcatgactgttccaggtctcgttctgtccagatgaagatctcttcgagtggctacttggaatgcactccagaggcccctgacattgattcttctctagactcaaactaacctagttacatgtccgccctcgaaccagcggctgcagccgaaggtgagatttggaaaattagcttagatttggtgtcaggaaggcgatcagctccccaaaaagggggaccacacgagagaagtgtggcaatcccctcaaaatacgagtagttaccaagagaagagaaagtgggcaagaccgtcaaagcatccactcgaggagtttaattatattcaaacccatagcaaaaaaagaagctgttttttgagcaaaaaccaacccagggaaaactttgctaaacgtccagatatttcaccagaaccttctgtcaaacataagaagataacagatttctgtactctctgactgaattttgctgaccaaatccaaagtcagttcacagagccacagatgactttactgaatttttttaaaaatgtgtttgtttttccgattatgataacaatacatgcttgttgttaaaatatttaaataatgcagaaaagcatttaaaatagtagttctcaaccaagggtggttttgtcccccaggagacatgtggcaatatctggatacatttttggttgttaggatagggggtaggggttagctcctggcatctagtggggagaggccagggatgccactagacatcccacagcgcccaggacagtcccccgcaatgaaaattatctgacccaaaatgtcaatagtgtcaaggttgagaaaccctgatttaaaggaatgtaaaaattaccccaaatcctactgtccagaaataaacactgccgacattttggcaaacatcatttagaatactctttttaatatatgcccattgcacacacaacttaatacaaatgagattatgcacatgaaaatgcttttctctacaatgtcatggctgtctctctgtattgctgtttttgtttgtttgttttttgagacagagtctcgctctggtacccaggctggagtgtagtggcatgatctcggctcactgcagcctccgcctcccaggttcaagccattctcctgcctcagcctcccgagtagctgggattacaggcgcccgtcaccacgcccggctaatttttgaatttttagtagagatggggttttgccatgttcgtcaggctggtctcaaactcctgcccttgtgatccacccgccttggccttccaaagtgctgggattacaagtgtgagccaccacacccggccctctatattgccattttaatgagtatttttaatacagcttaacacaatgttttatatttatttaatgcaatttcataaatttttaatacagcatttcattatatgaggactattgtttgcttaatgaatcttctgtagtttggcatttcagaattttttcccccaatttttcactattataaacaatgctgcaatgaacgaccttccccgtagagactacttggcctattagaataaatgcccccaagttaaatttccaggttgctttaaaatttctgcccagtgaacagcatggtgcttgttgccattctgctcccagagacccttgtagagtccgttcgggacagtatgagaatccccattatcccatactctgcaacactgagagttgccaatcttttttgtcttttctaatctgataggcagaaaatgacatatcattgtagcttatcattgataactggtggggtggaacttgtcttcatacttttttttctttttttctgaggcagtgtctccctttgtctcccaggctggagtgcagtggcaccatctcagctcctacatcagcctcccaagtagctgggactacaggcatatgccaccacacctgtctaattttccttattttttgtagagatgagatctttctgtgttacccaggctggtcttaaactcctgggctcaagcaatccttccacctcggcctcccaaagtgctgggattataggcatgagctgcctcgcctgccagaatagtgggtttttaatacggtgtttacctcttcttattgttttgcaagaactctttgtatattaaggatagtaattctttctaagagtcttataattgactataaaagtctccctccctccctccttcccctccctccctcccttccttccttccttccttccttccttttgttcccttctgctttctaaggatatgcctggtgtttggcaagcattgcatgaattacattaggaaataacttttgtaacaaacccatttaacaaccattctttgttccccgcctcctgataatgctcagagccacagcaacagcctttgcccaactccatgtcattaacccttgatcttttcctgctgaatagcagattgctttccggggctggcaacacagtttcattttcaccttcctgctgatggaactgccctggctctgtgccagatggctgtttacataagaaatgatttgattatattgcacagccaatggcagcctttctcagaataaagaagccagaaacatataatcaaagccattaactgtgtacaaagaaacgcagcccactctaaatttcccaccaaccataatcacagttttccagagaaaaataagaacagggttatggttccctactaaaaacgtgttaggggaaagacttttaaaaggaaattgtggtatagctcagttgcactctcagatcaacccttgagccttgactccaatcccagctctgtaactcactgtccttgtgaccttggaaaagtcgtttactgccaaaagcctccgtttctttattgtaaaatggctataatagtaatatcaacctcagaggtttacgagaggattaagtgagatagtgcataagaacactttctcagtcagaatgttttcagccgcaaggagcagaacacttgactaaaggagggaaaaaaaagctagaggacttataattttatttaacagggttgtttcatttggaggcataaagatgtaaccagtgattcacattcttttcttcttcctgctatgccattctcagcaatttatggacatgtctcctcatggtttcaagacagctgctgtggctccaggcatcacactgggacatgataaaatcaagcaaagaggaggagggcattttttcccctgtgtctcctttcatgatggagaaaattgttcccaaatttcccccctgcagatctgcagacttcttattggccaagatggcgttacatctataattccaaaccagtcactgatggaggaatgagaatgactgcagttggcttggacctataactcactctgaagccggggcgaggaatagccaccgtccctgagctcctgagtagatgcacaaccaacaaaactgaatcccgtcagcgaaggagtcatgggtgggcaacccgtgctgtgtctaccataagcacaactcctggtgctcatgaggtgcccccaaaggctggcatttggcaagctcaagactgggagtccacacagtgctccaggtgggaggatcacaaccgcgattggccagggagtccctctgggtgccagacccctgtatgcaaagccccactcagcatctccacttgattggcttatgggaacctcaaatccaacacactatatttgaactcatcatatttcctccccactggcctcctctgttggtacccaccttgctcaagccagaagctggctggtcctcaggagtccctgctttccttccccatctgtgcccacgtctctccagctctgccatcatcttccacctggacaccaaccaagcccccgctctccctgctgctgtgtgggcatcaacagcctatgctgttccctctgaacggaactcttcccgctcctgtttccctgtcaccttgctcaggaaagctcttctgatccccccaagttgaatccctcattacaaacctcacatcctgacatacatctctccattgccctgatcatacttcttatttacctgtgtgattatttcactcatgtctcaccccaccaggttgcagctccatgagggtgggaattgggtctgttttgttcactgataaccttcagtgcctgacacatagtagggcctcaattttattcctgaatcccataaatgaataaattcatcccctgccctgtggccagggagatcactctaagaagcaaatctaatcactccctctcctgccataagccttccatggctcccctttacccacaggacaaagtctaaagggcttaacctggctctttcaggctcctcaaagtggattctgccacctctccagccccatctcacctgccccattgtcctttacggtccagccaccctctactcctttaggtgtctcaaagtctgcatgttctctcctatccctggatttgcctatatgctatgtttctcccggaaactttgtctcaaaaaatcttcattctcattgccaaggctttaaaatttgcctcttttggggaaggtttagttctgtaagctcattctggaaatctgggttccttctatctagctgttgtcatcctcagtccatagcttccagtcaagtccaaaacagctgctatagcttctccgtcacatctacgttccaggcagtggggagagagaaagggtcattcctcttaagggcatgactcagaagcagtgctatcacttctactcaatcccattggctggagctcagtcatatgaccatgcctaactgcaaaggaggccgggaaatagaatcactatctgccgattatgttagcatgtttcccactaatgctccaaaattctctcagtatgagaaaaaagctgatggatgttggtggacactgatggtcctgccacactcacccccacagtgccagtcatggacttatctctgcccagccagactgtgagctccctaaggacagggaccatatatggtggtcattgcagcatcccctgcaactcacagagtgctggttgtgacatatggcaaatcagagtgaattgcagaggccggaaatacaaggtggagaaactgaggcaggcaccagttgagttccacacacattttctgggtgctgattacacataagaaccctgggcttggtcccggtgcctggggggcagcaacacttgtctggcctggcagtgtccccaaaagcacccagttgggggctgcaaggccccacccggtggggaagctgcagaaacagagcagagtccacagtcagaacaggaggcgccacaagggcctacaggtaaggcaggtcccaggccctcagcccacctggccctggccctgctgcactcttggccactccccaacattatctggccttgggcccagccctgagcacctgcccttccctgctctcccgagaggcctgagctggggttcccctcccctgtcggctgccgtgggaaaggccttatggtagctctcaaggtccaagttccagcctcaacagctgccgtacttgctattccctctggccagacctcccttccgtgctgctctagcttctcctgctctcagcttagacggcacctcctcactgtctccaaagaccaccgcccaccccggtgcctctccaccacattgtgcatcttgttgcttcccagcatgggtctgtgtggggtcgtaggggaatcctgctcttgttcattcatttgttggcttctttgctcgctgtctcccccagtagagacatggacattttctgtcttgttttccactgtatccagagcctagcccagggcctggcacctagtaggtgttcaggtaatatctatggactacctacatacacacacagtgaggaaagacaagagaattagcactcactgcactcgtatgacatgccagcgcatgcgttgttcactctgaggcccacgacatcattgcctggttggaatcattatctccatttcacagtggaggaaactgagactcagagaaatgaagtgactcgaccgaggttacgccaataggaagggccaagtctcagacggggggggatatttataacgaaatgcaaagatcttggaggagggggtggattcttggttgtacacatcgatcaaagctcatcaaactgtacagttgaaatcagaggttctcaaccaagcatggttttacccccaggagacattcagcaaagtgcagagacatttggtcatcatgggggtaagcaatgctactggcatctcgtgggtagaggccagagatgccgctcaacatcctacagtgcccaggacagccgccacagcaaagaattatctgacccaaaatgtcagtagtgctaggttgagaaactctgctttgaaggaatgtagtttactgaacacaaattatgtactccatttattaaggcataatcaatgcattttttgtaaaatagaaaaaatagaaaagaactaacataattggaaaagaaaggaaccaactaagtacaaaacaatggccacataatttaaaaaggcaaagaacagatcagaaaatacaaagagcctatatgtaaatgacaaggggctccaccttaatactaataagggaaattcaaattataacaaaaagctggggggttgcctcatgtctgtaatcccagctctttgggatgctgagttaggagaatcacttgaagccaggagtttgggagcagcctgggcaacatagtgagaccccatctctacaaaaatttaaaaattagctaggtgtggtggcgtgagtctgtagtcccagcttctcaggaggctgaggcaggaggatcgcttgagcccaggagtttgaggctgcagtgagctatagctaaaaaaaaaattacaacaaaaataatcacaatgggaaaaaatttttttaaatgacagatggggccaggcgcggtggctcacacctgtaatcccagcactttgggaggccgaggcaggcggatcatgaggtcaggagattgagaccatcctggctaacatggtgaaaccccgtctctactaaaaatacaaaaattagccgggcgtggtggcgggcgcctgtagtcccagctactcaggaggctgaggcaggaggatggcgtgaacctgggaggcggagcttgcagtgagccgagatcgcgccattgcactccagcctgggcgacagagcaagactccgtctcaaaaaaaaaaaaaagacagctaggctggtgagtgtgggggaagtaggccctctcatcctctcctttgtggatggagggagtgcaaactggcaaagccctggcggtggtgtggtagcactttgcatcatttgtctagcaatcccagttgtgcagaaatacacatgcgctcagagagctgtgtgcggatgctcactgtggtattgtttataatagtgaagtttaggctggaaaactaaatatcaatgaaatcaatgaacgtggaattaggtaaataaaccatggtgcattcatgccatggaatactatgtagcagatcaaaatgataaggcaaatctctacacacatagttaggcggaacaaaaaaagcgggctgcaaaaccacatttgcaatctgtttcgaatcaggtggcacaaaagaaatccagggcccaggccgctagcgcttgccatcattcatcaccccttctccccacttttgaatggggcggcaatgtgcccaagtgaaataagacctccccagcctcccctgaaaccacgcgggtgcaatgtagtagccatgagacccagagcgcacacactttgtcccttccctgccctcttgccttgctgagaagcaaccctcttgagccaggagtttgaaagtcacataccaacatgggagaccaggaagctggtcattggtgatgtccctgaacaagcctacaagcccagacttgctcacctctagacttctttttacacaagagaagtgaactcccattgggtgaaaccctggtgtttgttattttttacttgcagccaagtgcaatttcagaggcagcaaactcactggggaggaggacggttgagtcttctgcaacagaactgtattcaagtgtcatttacatagttaagacttttctaaaataaatcaatacatcaaataaagcctgtctggctagagtctgtgggactcttgctgtttctttcaaaaagtgtttgttgattggctcaggtccctctcaacccaggcaaaaatgccaaggggaagatggagggacatcgaggggtttccctgtgacctgctgaaggagaggttggaatgctgttttcttaggaaaagctccattttcctggtaagaggactagcgcctgagtctctcactccagggaggctcaggggtcagtccaaccagcccaacccgggctgcccctatcataattggtgaccctctagcctagacatgctagcctccaggcagtgacctggctgtctctcccacctgtttgtcctcttcccagaaggaggatgctccctttatctcaggccaaagtacccccctcaccctcccagggaaggggaggaatgccacctgtcatcacgggatgggtgagtcacctcttactggctggaggccatagccagcccaacctctctcttttgccccctagctctcccctgtgggtggggaacgatgggaatatcaccctaaaaatcgtgacagcaacagctgccatctctgtggcatggaacctgtcactggaagcttgagtgcacagccctgggttccaagcccagctctcatgttctaacctggtgatctggggggagtcaccccttcctgatccccatttatgcatttggcaaacgtttattatgcaagcactctgaaccgggcagggggtgctgaggatgccacaacgaacaccccgaaacaatcctgccctgtggaacccattaggtagagacgttcaaaactaacaataatgataatgttaataaattttaaaattccgagtgtcaattggtgatgatgtcacagagagaaggggcgaggagtgctggtgcagaggtcttgttcatgtaagcaggtggtctaggacgccctgagatactttgaaaatggaggaaagggctgggtgtggtggctcacacctgtagtcccagcactttgggaggccaaggaagtcagatcacctgaggtcaggagtttgagaccatcctagccaacatggcgaaaccctgtctctactaaaaatacaaaaattagctgggcgtggtggtgaatgcctgtaatcccagctactcgggaggctgaggcaggagaattgcttgaacccaggaggcggagattgcagtaagccaagatcatgctactgcactccagcctggtgtctcaaaaaaagaaagaaaaaagacaaagaaaaaataaaatggggggaagacctggaggaggtgagagagggaggcttgtggttctctcagggcacagagtctcaggaagagagaacagcaagtacaaaggtcctgaggctgccgtgtgactgatgtgttccaggagcagggaggaggccagtgtggctggaaggaagatgccagaaaggcagagtgggggtgtactaccacacgggatttagggacactgccaggaccttgtctttgactgtgggtgacatgggagccagaggagggtgttgagcagaggagagatgtgatccgacttcctttgggtagcaagacaatgatggaatgggggaggtagttcggaagccatggcaacaatccaagcacacacactcatgccagggcggggctgcggaccttggagggtggtaggatcctggatgcaggctgtggatgggaggtggtggggcagaggctagagaaagagaagagtcaatgaggacactcaggtgtttggcctgagcccctggaaggagagaggtgccactttcagaggcaaagacgatgcaggagaggtaggatcctgctggaggaggcgtttggtttcttacctgggatgtccgagatgcctgttaggcatattgagtcgtagctggatattcaagactgagttcaaggcaggaaatgtatggttagaggcttttagcttggagatagtatttagagactcagtttctttgtctgtaaggtggagattaaacagcatctgctttgcaaggttgctgtgagcctgggttgaggactgagagttcatgggcaggtagcaaagtgcaggtaaatgtcagctccgttacttccacacccagctcactcaatcctcatgaggtcgttattattgccatcagctttaattttacagggagtggaggttcagagaggttaagtgactggtccaaggtcacatagcctgaaaacagcgcagccaggatccaaggctgaatctagagtcttgttcttggctttctaccctgctgcctcctccctgctctcccagcaccaggcccttggatcttgaactgatcagacttgaggggctcccagttgggaagggagacaaccgtgagtggaaatgcctccaggcagacaggacctgagcctgccccactagggggcaaattagaaggggggccagtgaggcagcacagccatgtggttaagggaagcactgtgatgccagaccacctgggtccaatttggctctatcctcactaggtgtgtgatcctggagatgtgactcatgtttatttgtgcctcagtttctgctgctgtgaaatgggataatacaggttattgggaggactgaatgagttggtccatgcaaagtgcttagaacaggaccagaaactcaataggcgctccagctcactttccaccaaacgtgtgcccccagggcctggggccacctgccatgtctttgggtccacatctgtcccttgctcaaggttcacatcttgccttggctgctgtgagctatgtgtttttgggtttctcacccaacttccctgcactcacacttcctttgaccccaaagtgggaaccatatctaccagtggtgaggatcaacatgcacagtgcctgcagaggacactggattgtaactgtgacaggcctcaagtgggtgctcagtgtgcacaaatgttcatgacagctggaaacccagatgtcctcctgcagtggaacgctactcagtcacaaaaaggaacaagtgcgtgatatttgcaacaatgcaatacatcttgcaggcattgtgttgagaccaaaaagaacgctcctggtttttgaaactctagatgaaacacaactaaactttggtgacagcaagcagatcagtggctccctcggctgggccagggatggggagtttggaaagggatatagggaacttcgttttagaaatgttttgaatgttgttttgggtgtttgattcattggaattcatcagactaaacccgtaagacctgtgcattgattgcatgttcatcatatcccacttttaaaaatttttatttttatttaattttattttttgagacaaagtctcactgtgtcgcccaggctggagtggagtggcacaattacagctcactgcagccttgaccttcccaggttcaggcgatcgtcccacctcagcctcctgagtagctggaaacacagacgtacatcaccatgcccagctaatttttctactttttgtagagatggggtctcactatgttgcccagggtggtctcaaactcctgggctcaagtgatcctctggcttctgcctcccaaattgctgggattacaggcgtgagccaccgtgcccggcccccaattattttaaaaagcaacaaaaaagtttgtcgttgtcatcatcataaatttgttcttatttctctgactgttctatggcaccaagtgcccccttagccccctcttttgaggccagcagagacccagagctaagtttggggtgacttttccctacctctggtccatcaaaggtctctgccacataaggcagatgagctggcactgtagaaagagccctcagacccaggtccaaacctgactctggctctgcctcgtccttgctggctgcccctgagtgggtcatttaagcctcagtttcctcatctgttaaatggggctaatagtggcgcccctgcttgtgaggtggttgccaggattcatggagattcttagagataagaggtgtgcagggccgtggatattggaggctcacagaaacaaaacagaacaaagcaaaaacccccaaaggaaaaaaaaacccaaaaccaaaataaggcgaagcagctgggagagggtgggggtgactgagcgcagcggcctggcgccagagtgccgggcatcaggtcctgctcctgggccatcgccgtcacctctctgtgcctcagtttctgcatttgtaaagcaaggatgataccagcacccagcccacaggctgtgtgagggctgattgagtcactcatggagacagagcagtgcgtggtgcctggtgcatgcggctgttatactgagggttgggaaggggaggagcgcaccacctcgggggtaactcagagagcccagtccttcttgaattgctgcctggcccaggccatggtgtcccagcaggtgaaggggtgggcagtccagctgccagccctgtcagatgcagccgcaggggctgtggctcaccaaggcccggggcctgtcctgggctcctcacttggctctcgtggctgggacagattgcttccttcctctctcctgggtgccaggtaggcccagaaaccacctgatgtcagcaaggcctggccacccactggtggggaggaagtgggcgggtgcccagggacagatgagccgggcagacgtgccctgaggcagcacagtcagggctgacgtgggcattatgcacctcggggctttcagagctggctccggtcccgtttgcccacatcaagcaggtcagagtggagagggccaggggcgctggggtcaaggcatgcactgaccaggcgtctgtccccactcctcaaaacacagccaggagatgagcgcactggggtggtggcctgtggaagaggggcagggtctgtgtccagatgtggccggagggtggggtcgactgtgtgcggtacgtgtgtatggaggtgactgtgtgtctggcatgtgaatgtaagattttaggaaggtgagtgagcttgtgcacaggtgtgtgtgtgtgcacgtgtgtggctaagcatgtgtgagtgagtaggcatctgtgtgccgtgtgtgggagccgggcagggggcagcgtgtatggctgagtgtgccagcacattgctgagcatgtactcgtgtgcgtctgggtgtgtgaatgacaaaataagtgtatatggttaattacatgagtgtgtgagtgagtgtggggaggggatgtgtgtatccttgattgtgggagtcagagtgtgtgtatgtgtgtgtgtgtatgtacatgcgctgttgtgaagagttctgcaagaacccctccccttttttaaattttattttttgagatggagtcttgctctgttgcccaggctggagcacagtggtgcgaccttggctcactgcaacctctgcatcccggcttcaagcaattctcctgcctcagcctcccgggaagctgggattacacacgcgcaacaccacgccccgataatttttgtattttttttttagtagagacggggtttcaccatgttggccaggctggtcttgaactcctgaactcaggtgatccacccgcctgggcctcccaaagtgctgggattacaggtgtgagccaccgtgcccagccaagaaaccccttttgcatacagagctttgctcctttgcacgaaaatgcttatgaacaggtggggtcagctggtggatgtgtttaaaattttgacagaaatggccaaggagctctttagaaagggcagaggggagcggtgatatccaagttgatccctgaccagtcagaacaggtgtcagctgcaaatacccaagccagctgagccagccctggtcactccaacttctgctcccaccagcagcatccaagaaggcttgaccttgagtcattctcaggccatccccaaagcaaacagtgaatggtgagctttataataacaaagtcaacatattataatctcatgggccgtcagttacaatggcaaacattcattcattcattcattcaccaatattcactgagcacctactatgccccaggcacagtttctggtgctggggatgcagccaagaacaagacggacaaaaattcctttgctggtggcgctggtgggaacaagcagacgacaaaataagtgaacagcctgtggagagggttaattggtggtaagtgctgtagataaaaataaagcaggaacagtagatccagaacgccaggtgggtttgcagttttaaaaagactggtcagttggggctccaagggaagcaggcgtttgggtgaagacctgaaggaggtgagggccaagccacatggatctctagcggaaaagcaaagcaacccccaggcagaggccacggcaagcgcaaagggccggcgacagcacacacttggccagttcaaggaacagagaaggggccagtgtggatttagtagctttttaaaaactaatgataaaagcaaatggtgcttgtggaaccaccacacagaaaaacgaatacaagagaaattgaaagtccacagtcgctgaagggtgggggcaggggagatggactaaggatccgggtgtctggggtacagttcacttgataatcaaagcaattttccgttttgacaaggcaacgccaaaatagcgcagctgcatccaaacctcccagccgcagcgaaacacccggcgtttttacactcgtaccccagcccgaccctgagccaggcacgtagtaggcgctcggtctgcttctacatcctcccagctccctgggtcctgagggggcgaggaaagatgagtgcaaaccccccaaggtacagactgacttatccccagatccccacaggccgccagccaggcccccagcggccccggaatgacagcgtcgtctcttcctcctcctgcttttatgagctgtgaaggaggcttgtctcgcgttgcacaattgccccttaattgctatttcctctcagttatgaattatgtcatggatatggccgctcacgttattaaacttccacacaggccttatcgtctggagtccggccagcaacccagcctgacctactttcccaccggatttcaaaaccgcctcccttgtcctctcgttggacttttcctaaggagagtctactgtgcccaaaaacttgacgctaaaaataaaaactagaacggagaaggggggccacagctggccccaccgaaggcctgaggctcggagaagtccctggtgactggggccaaacccctcccttcctagaagcttcctcagaaaacctgtccttgcgatgcagggttcccagcaggacaggcagggacaccagccatagtcccaggtcccctgcgtgatcagatcccactctcgcctttctcggtcatggccgggatgactgactttggaggcaggcaaacctgggttcaaaccttagctctgacactgactagcccattcattcattcattcattcactccaggtattgactgtctcctgagtgctggccctgtgctgggcagtggggaaatatctgagaacgaggcagacacagtcgctgccctcatagaacttttaatctagtaggcagagatgggcacaaaacacaaattctgaaattagggcaatgaagaaaataagacagtgcggtaggtttgagaacagcagggctgcccgtttgagacagtcagggagaactctctgtgcggaggggtcatttaagcaaagaccccagtcatgagaagagccggatccaggaagccagccctaatgagggaggggctcaggaggtgcctcgcatgcaggatagaaggaggcgcttgctctcagtctcagccacgcgcaggttggcatttgagagtgagagcctcctgaaagcttcaccctggggatctcacttgccccaacctagtcctgggcctgctgggaaggaaaggcatctaagcaaagggcgcagcgaatgcaaaggccctgcagtgggatgagcctggcgctctggtgcagagagagccagggaagagtgcagtgcagggatggggacgtgggtgaagctggagaggtgggggtgcagaccacagagggcctcgaaggccatgctgaggatttggtaagggagaagctctattgtgagggcagagctggcaatcctcgtgggtgaggtgatatttgccggggaggtagggaagactcagggtgcatttctaggccggatgacttcttgattgatgtaggagagattagcaagtgcttcatttctcagtctttaatattcttcatctgggaagtgggaataataacatcaacctccccagagaaggtaccatacttagcacagtgatttacctgggtcacccaggaagttcgtggctcagccaggactggaacccaggccctgctctccaggatgatcgcaacaggcaggggctggatcttggcatgagattctccagcgatgccacctcccggccaaacaggcctcagcagcaggggctggatttttttctttctgaattgtgcttatgcgtggggctgtttatctaacttggctgaagtttgagtcctgggtctgtaaacatacccttttaattattatacaaatggtacatgttcgtggaataaaaatttgaaaatgaaaataagcaagaagaaaaagaacgagagagaaagagggaggaaggagggaaggaaggaaggaaggaaggagggagggagggagggaggggagggagggaggaaggaaggaaggaaggatctaaatcaacacatgtacacctagatgcattatataaggaccttcattgcagcatcctttgacataacaaaagcctccaaacaatgtgaatatccaagattaggggccttcgtagctgcatgaattaaagagtatttcaatcctgtgctgagactgaagtgaataaagcagatatcgctgtactgatttgaaacaacagccaagatgtaatattagcctagaaaaatgagatgaaaaacagtgattatagaatgctacaaagtgtgtgtgggtgtgtgtctgtgtgtgtgtgtgtgtgtgtgtctgtgtgtgcgtgtgtgtgtttgtgtgtgtgtctctgtgtgtgtgtgtctgtgtgtctgtgtgtgtgtgtctctgtgtgtctgtgtgtgtgtgtctgtgtgtgtcttaaggagagagtgaggaatgtgtttacctatttgctggtagatgctcaggtttcctgactttcgcgtggtaaaaatggcaagtcagagatgggaggaaggatgatattttgcctgtccgtttgcactgttgaaaggaaaacttgtggcttctgtttttgtttttgttttgccatgtgcgtgcctgtcttctgtgcaacattttagcaatatttgaaaaatcagagacttttcgaaaggccctgagataatctaggctggcgtttcctgaaagttcccccaaatcccaggattccagcaaggtgcctgtaggccatggggcttggggtggagctgcaggcagcctgaccctccttactcagagatgtttctctttcatcttttttttataggttggacaagtaaaggttcagttgtaaaagggttttgcctgctttgaaacgaaatttttgaaaaactttgatcttgaataatctcttcattctaccgatgaggagacaggaacccagaaaggagaaaaaaaggatcgtctcagcatcaggctgacctgggtttcagtctagctttggctgcgtgccttggatagtaaattttcctccttgaaccttggcttcttcctccagggagaaaaacctacctgaaggtgattagtacacagatatcaaaagtggaagtagaccctgagtccttagctaaggactagaacgatcgtggcagaaacgtgcacaggaaatcatgtggcctctgtctcaccagcgggtgttccaggaatggcaaaagtgttcccttttccccatttcactcaagtctagaatcaggcatatctcagtttgttagaagtcagctcactacaaaacccaggtattccctgggacacatgcaactgcaaggggcagggaaactcaactcaaatgactttatcattaaggaagtgtgtcttcctgtacattcagaaaacccagagatggcatggcggctctgacaggcatgcattcagcttcgaggaacacagaccctgacccctggcagcatttatttatattgtcccctgctacaagaaatccagaggcatccagagctgatggggtgactcaggggtgctaccaggggttcaggttctttcccagttttgttgttgttgttgttattgttttgagacagagtctcactctatcgcccaggctggagggcaatggtgtgatcttggctcactgcaacctctgcctcctgtgctcaagcaattctcctgcctcagcctcccgagtagttgagagtacaggcgcccgccaccacgcctggctaagttttgtatttttggtagagacgtggttttgccatgttggcgaggctggtcttgaactcctgacctcaagtgatctgcccgtctcagcctcccaaagtgctgggattacaggcatgagccgccgcacctggtcactttcccagtttttgcttagccatctcgaacatgtggcttctgtcctcatggttggccataattgcagcatgaccattccaccctcagctcatgtccacattacaggctggaagaggggacaagggcagagcagtgtgtccaccatgtttgtctcttttcagaaagctcttctgggggccccactgggaaaatttggctttcatatcattggtcatgctggatcacgtggccattcctggctgcaaggcagtctaggggagtgagtgcgttttgctggctcattgccatcccaataaagtcagggttctgtcaacaaggaagaaaaggagcgagggcattgggcaggcactgagcagtgtctgccccagtagttcaagaattgttgatacaatggctgaaagacatcttccaaaacctgtgttctctttctgtttgcattctaccatcctcagtgtgtgggcttccatcctgagacttgttttatcccctcagtttcaggagggggtcccttccttgaaggcatgtgctgatgccccctcaaaaaaaagtgttctcccacctagggaggagagttgaaaagagctgtggttgggcagttgacaatgtctgctccacctctattcaccggaacttcttctgttccatcctcttttcagttcagctcactgcgatttcatttccatctcacagcgtggatcagtcacctatgcctacaagaatgctgcctgagaaaccacccccaacctgttattctcttgaatagggagttggctgcaggttggtggaccttggctggacccattaatatatttcctgttcagctggagttctgctgtcttggctgggctggctctgctctgcctcacgggtccctcgcccttttcctgggaccaatgggccattctgggcatggctgctgatagtgggggcacaggcacaacagccacgtggaaacatgcaagagatctctttttttctttttttgagatgcagtctcactctgtcacccaggctggagtgcagtggcgtgatctcaactcactgcaaccttcgcctcctgggttcaagcaattctcctgcctcagcctcccgagtagctgggattacaggtgtgtgccatcatgctcagctaattattttgtctctctttctttctttttctttccctttctttctttctttctttctttctttctttctttctttctttctttctttctttctttcctttccttccttccttccttctttttttttttttttgagatggagtcttgctctgtcacccaggctggagtgcaatggcgcggatctctgctcactgcagcctctgcctcctgggttcaagcgattctcctgcctcagcctcctgagtagctgggattacaggtgtgcatcaccacacccagctaattttttgtatttttagtagagatggggtttctccacgttggccaggctggtctcgaactcctgacctcgttatctgcctgcctcagcctcccaaagtgctgggattacagatgtgagccactgcgccccgcccaattgttttatatttttagtagagctggggtttcactatgttggccaggctggtatcaaactcctgacttgtgacccgctgcctcagcctcccaaagtgctgggattacaggcatgagccaccacgcccagccacattcaagagatcttaaagcttggtctcaaaatgacacactgtcactttcatctcatgctattggcaaaagcaagtcccatggccgaactgaagtcaaggctgggcaaatacactccatcccttttgtgggaggaaccacagtcacatgggcgactgtcttccttatcatcactgtttgctgatgttcctccgatctctctgactttgttttggtctcatatatgggttcctcttctctctcccttcaaacactgtggggccctaagcgttccatgccagctcttctcttctgtctctatgtgtggtctctgggccatcccaaccattctctagttttcagtcaccacgttggcactaaagacccccaaatccattagtgggctctctcctgagtccagttgccaactgggcaggccacctgaacatctcacagaactcccagatctttctcctgctttgacctcagcaccctcagcctcagccccacctcaaactccctcctcctttattcccatggcacacaaccccctccatgcagctgcccaatctgggaacctggatgtcagcaagcccacctgtctccatggtccgttcatgctacagctgatgctgatcatgaccactggctgagtacttcctgtgcgccaaggacagggctaagcctcatcccaatattttctgatttaattcctgaaacacccgcccccctccccccaccctccgaggaggggggcactgatatcaagttgtctgtattccatatggcacatgccctcatgggacaggtggcttctttcagaagctgcagtgatctctcccaaaccaattggttctgtcaatccccagtgaaaaatccttaagaatcctcattgtcccagagacctgggctaaaccccttggtctgaagcggtcaggtccaagattctttcatttattcacacacaaaaggaaatgattgcgctcactccataagccagtcagcctctgggcgctggagaaacatgagaggccctgggaacttaggcccaacggcaagagagaaaataataaatatctaacatgtcaggtagtgacgaacagatatgaagacaaataaggcaaggcgaggggagacttatttgagaagggtcactatttcaggagggaattcagggtcagcctctctgctaagaagggattgcaatgaagtaagggggtggcaagtgcaaaggcactggggtagaaaggggcttggtggccgcctgtgcaatgagtgtgagaggtggaagaggctacaatatgggcgtggcttcctccctgagtgaagtagggagccatgggagggttttgagcagaggagggccctgccctgactttgatttttacagaatccctctggctacttgtggataacagtcttcatgggggccaggaagcggagaagtctgctgcaggaagcgaggttttgcaggcctcatgacacttagatcacagagaggattcaggggtttgagtgacattctcaaaagacacaggaaaaccaaacaggattttcgggttaaccagaagctgccagaagatggacggtgcccagcatgccctgcccccaggcaccctggtccatgggccttttgtgcagcatcctcggcgggtgtggacgctgtggtgctggtgttgctggtgggttttcccctgtgcctgcctcttggctgttgaggacagtgctggggaggatgtgagcacttagcaccccagcgtggtccgggcgatggtggcccagctcccgccaaagacgctgacttctttgaacccgagaacaaacattgacgttcttagttctgcaaaaaaaaaaaaaaaaaagccctgcgtccatgcacgctgtatccccccatcaccaaactcacttatctcgctgcacaatccttcaaagcacaacacaatgtatttatgtctgtggtttaggttcccaaaacctgtgacatcagataagtacgatgttcacaaaaacaaacatcgcagaaagggaaaaaaacgaccaaaaagaagcagctggtttcagcctcgacttcctctcccaagaaaaaggggctctatctggctgaggtttcactgtattcaggctggggggtcagaggaatgccgtcctgccctctgtccaactgctcgcatctcagcctttgatgtgtgactctctgaggctgaaaaatctcacctgcaaaatggaaatgccaatctccacctcttgggactcataaaaataataataaaatgataataaaaatataccaataattgctcatctttggatcaattgtgttccataggtcatttccttagcaaatcctcacatcggcctgtgttttgccttcacgtggggtggctactgagaacatctccagttgacacatggggaaactgaggcttcaagtaggaaaaataggcagttataaaacactgcatggctacttttggtttttagaaaatgcaaacatgtaatatataaattaaataaataaataacaaaatataaaaatataattaggcaaaaaagtttggccggttaaatgcccaaaagccacagtgctttcctgagtatcagagtgaccattgagacaggagtcccaccgctgtctccttctcgtcattcccgtctcggcaaaatgtcacctctgctgagaggtcgtccccaagctcttgcctaaggtggccctccggtccctcttattccactcaccttatctctttctgccctgaccgtcgctggaatgcgccgtattttttcatctgtttctgggcttatcgcctgtgttccccgctagagcttcagacccaggaaagcaggaacttcaccccgtccccagagccttgcccagtgcctggcactagtggatctcaatacatattcctggaccaacggaaggtgttttcttatttttaaaaaatgtactttgcacactgggcaaggtggctcacacctgtaatcccagcactttgggtggatgaggcgggaggatcgcttgagtctaggagttcaacacccatctgggcaacatagtgagaccctatctctataaaaaaaaaaaaattaaagtattagcagggcgtggtgatacctgcctgtagttccagctactccggaggctgaagtgggaggactgcttgaacccaagaggtcgaggctgcagtgagccgtaatcatgccactgcactccagccttggtgacagctagaccttgtctcaaaaataaaaatacaaagtgaaaaaattgctttgctttttcaaaagcaaagcacaccatatgagttgtttttaattgttgttttaagtgctggtcaaaaatgagctggcaggagcctcagcaggaaggcacagcctcggcgggcttatctggctgagtgtgaaggaagtgggcacactggcttcccacagagtgggtcaagcagcgaacatcccagagtttcccagcccagtctgcccccagttctctggcgctggagatcttcccgcctgggacagggttatctttgaatgacagcgtgttcagtctcccccatggggtgaggctgccctgaatctcagggagcaacagggatcccctgggccaaacacagcccccaggagatgttgcttggcccatgcagttcaaacagcttggaattttggcattattttaaaaatcaagatattttggaagaaaactttgaaaatcctcccaaagggcaccaaataagatgagaataattggatgggaagatttcacatccttaagatgaccattctgccaacatacataaaacttaatgcaatttaaagtagcgacccacaaggtttttttagttggataaaacaatctttgagttcacaaagaaaaaagtacaaaatgaaagaacaatgagaaggatcaggacaaagataatatttcaactcactgggaaaatggaatatttaatccaggaccccagccgagcccactatcagcaaaaaacaaaaatggactcccatcttctactacaaatccagggagttcacataaaacacctggcttgtccaaaagtcccgaccacactgggcccttatttttgcaaggcagcaatggattgatgctgagttgcatctcggggactctccacttcaccacagtctccaccattccctactgcatcccacctgactgccttcaatcatctgtgtgtcttgcttgggtgttcgtagcctctgaactcactacacaacagaaggactcagggaacctttgaagttggatttctgctgttagccacctttgtactgttctcattttgcatagtggaaatgtgtatttagaggagggatgtggcttcaggcatgattaagagcatgattaagttggtccacctgggccgggcgcggtggctcaggcctgcaattccaatgctttggaaggctaaggtgggaggaatgcctgaggccaggagttcaagaccagcctgggtgacagagcgagaccctgcctctaaaaaagaaaaaagaaagaaagaaaaagagcatggagctagaagctagagaggcttgagcaacctgtgaagagcgacttccccgctcagtgcctcagtttcctcctctgccacatggggataataagagctgtcacacatcatgttagttgcagagatttgtgccattctgcaaaattcttagcccggggcccagtgcagtgtcggtgccagggaaacagtggtgatgacaaaaccctccctttacatctacggcttttagttctcaggcttctaagggaggaaagaaaaaggaagaaacgaagggaggaggggtgcagagcggagcatttgcttttacctttgatctccttttgccaaaaaggaggggagaaagtaaataaacaggcctggcctcctttgattccagcgcctgcccggcacagagctccagagctgataagaaccagccaagttctaactgggcaactccaccctcctgaccaggccttcccttggcatttggaatccaggacgccaaagccctcccctgcaccctactgtcagcatgcaccgttaatgcccttctcgccttcccaaccatgggagaaaagatggagagaacttccccactgtggaaccccacacaaaacaattgggcgggtttggagacaagaaaagggtcttagaaagcggcttccgaatacattagaaacccagtcccccatcccaggaagaagcccccacactggggacttgcaggaaaacaaaatgctcagggatttgtcttggcaatgaattaagcagaaggctggtgaagttctcggcgcagagcagaaccacccctcccaccccccagtggttggtggagagaagccgtgtggcacggtgggtaatggtatagctttgaacccattcgtttatggttgtgtgactttgggcaagtgactcggccctgtcgaacttcagtttctcatcagccctggcactgggctcatgggattgttaaaggttaactgaggttgtgcccatcgggtgcctggcgcatacatagcaggtgcttgtgcttggacactgtgattataaaatggcttagggagtcccaggatggcctcaggaggagagacaaaaaaaaaaaaatgctcaggcctcatgtccggaaagatgaaagaggatcagtttgaaatctctaaaggcaccaagggccatgcagtggccaaggtcaggcaccgggtctgcttgaagttgacaggaggtaaattcaggacaaagtttagcatacacagaagacattccttccacattccccccaggtaggccctagctgatggctctaagagcttccccaggacctctgctaaatagctcagagctaaggcagagggcctgggagaagaggcagaggtgaggggtccctcccacccctgcctcctcctggctgtgtgacctgtgtgcctggcctcagtttctccacctgtaaaatgaggccataataacaccaaccctgtaggttttgaggatagaacacatggcattctgctggtgctcaatgaatgaacaaaagtcacaaaccacagctacttccaggatgaggctgtggaagcggttgtcagcagggaaagaactgactgctcttgactcctttcttaggaagtccaggctcaattccacatccacgccccgtccacctaccctggaggcagggcctcgctctgcttcgcacattcgcaagtccccagggcctggcatagagcaagtatttgttcaatgaatgcatgagcctggatactctgtggagtcaacctccactgagagcaaagggaggcccagagaggccaggtaacttgcccgaggcctcacagccccctgcctgcctgaaggcagagctggaactggggctgagctgagcctggtctgcacccctacttgctctgggccttcccctcggggaagcctgctgtcccccacctgaacacaccctgcccaggcttcccccacccagcagagcaggcacaaggagctcctcaggtggaaggagctcctccttccacgagtgttccagacgctcactgacctctgcagggactggccttcccctctctccctggtaggctgaaggccaccagcttgccacctgcaggcctcgtctggcttcagacgagttccgttatgacctgcactgtgtggttttgtataacctgcactgcatgggtttccttcatcattttgaatcatttgccaacatttaaaaattggcgatttcgtataaaacccagaatttccagcttctttcggaaagtcggcctctctggccaccaggcctgcttttttctggctctggtcagcaggagcttcgtcctaggcctcttcactcccctcgctctgacctggtggtcctcactcaaccctgggcctactctcccaggcttacagcctccttacataaaggcccaggcctgcccggagaccaggccactcgctcccccgccaccgtgcggtgcctcctccgttcaccctcagcccgggcactcccagggaaagccaaaaaggcaggattggagccaaactctaggtgtccagtagacagaataatgaccccccaaaggtgcccacctcctaatccccagagcctgtgaacatgtgaccttacatggcaaagggactttgtaggtgtgattcaattcagggtcttgagatgggaagatgagcctggcttatccagtggacccaaggcagtcaccaggggccttatgagagggaggcgggagggtcaggcccagagggcccacttcgactccagtgggagcagaggtgggagcggtgcaagccagtgagtgccattggcctcaagacaaggcatggattctcccctgaagcctccagaaggaactccatactgcctgcaccttgattttcccctcgtaagacccactttggctttctgactttcagaacagtaaggtcatgaaagtgtgtcattttcagtttggtgtaatctgttacagcagcaataggaaacatcccagggtttgaacccaggcttggccactccctggctatatgccctggggcaggtgacatagtactgagcctgggttttcccgtctgaaaagggggtgagcagagacttctgttaggtgggggctgtgtgtgggggtgaagtcgatggcacaggtaaggtgtggggcagagccctgacagctcacgcgctagacgccaccatggttagcatcgccctcttacttcctctcacttctctcactgtcactgaaaccaactcagagcaggcttttgaatctgcccactgctgcccaagataaagacgaaacttcctacttaggatcctacacaatctgccttccctaataataataacagtaatgattaaaacaataatgtccactagcactgatgaagcacttggcaagagccagatattaactacgtattaaactcatttaggccaggtgcagtggctcacactcatcccagtgctttaggaggcaaggtgggagaatcgcttgaggccaggagttcaagaccagcctgggcaacatagcaagacccccaatccctacaaaaaataaaaaatttgccatgtgtggtggcatgtacctatagtcccagctactcaggaggcagagatggaaaggattgcttgagccctggaggttgaggctgcagtgagctgagatatcaccactgcactccagcctgggtgacagagtgagtgagacccagactcaaaaaaacacacacaaaaaattatttaggccagatgcagtggctcttgcctgtaattccagcaccttgggaggctgaggtagaaagatcgcctaaggctaggagtttgagacctgactgggcaacagagtgagacctcatctctccaaaaaaattaaaaattagccaggcatggtggtgtgcacctgtagtcccagctattcagtgggctaaggcaggcagatcgcttgagctcaggagttgggaggctgcagtgagctatgatcaagccactgcactccaaccggggtgacagagtgagactctgtttctaaaataaataaataataacttcgaaaattcacttaatgctcacgacaatcctatcacttgccctatttttctgataggtaaactgaggcccaaaagattaagtcacttgcccaggatcccctggcaggctggtagctagctgggatttgaacccacgtggttgggtcttggagcctggatgctaaccatggggccgtgctgcctgtatatatgagcagaccagggaataacactcagggccccagggagtggccagagactcagtgatcatggcctcccctccatacactgcctgtcctgggtacaatcctggacccgagagatctgagggtcgtggctcctcctggtacacagtttgtacccacaagtgtgtttattttgcaaaacagtttccagcagtgcccactctctgccggacacctggtttccagaaaaaatgcagacccctccactgtacttaagatggtggagacaggccgggtgtggtggctcacgcctgtaatcccagcactttgggaggccgaggcaggcggatcacctgaggtcacgagttcgagatcagcctggccaacatggcgaaaccctgtctctactaaaaatacaaaattagccgggcgtggcagtgggcgcctgtaatcccagctactcaggaatcacttgcacctgggaggcggaggttgcagtgagttgagatcgcgccattgcactccagcctgggcgacagagcaagactctgtctcaaaacaacaacaacaacaataaaagattgtggaaacagatgagtgcctaggctgtcacagcccagtgagggacggcaggggcctgggggcagggggaggtcgggggaagctccctgaggcagggccatctgaggagaagcccaaggaagctgacgctggcatccttgaacagctgagctgagtgccgcaaggaggatccgcccaggaaggccccggtgagaggaagcccgtgtgcttggagaggtggatgtggtcacaggtggctggagtgctggagagagtggaaacgtcaagaggtcggcctgggctcggccacttactgtgtgaccttgggcaaacttcaccgcttttctgagcctcagtgtccgcatctgtaaaatgggaataggatagcagggtacctcctggggtggttctgaggatgcgacgcgtcactgcgtgtgaaggtcagcgcctggcatcgggaagggctgcattggtgtgagtcggtcttgttgctgtgattatgatgaatacgaagcatcgcgttgtcagcctgcacgccacctccccttccaatcagctcctcagatgcagaagccgtgaagctcccacaagttcatggggacaacccgtgtgagaccagtgaggaccccctgcctgtggggagggatgtcttcccaagaagtttcatgtctgccatcccagacccgggatccaggccggcgtctacactccctggggttcccagcttcaggcagcttagccctctgcccggtgtttgctctccgtgtccctcctgtccttttgtgtatgacacgtgtccttcccccgctcccttgagctccttcctcatcttcaccaatacgatttgtcagtcactctcaatgcccaagttcctctttttcaagcacgttaacaatacgaattgctgagagtttttgagcacttgctatgtgcctgatactttcattcatttattcattcagcaagtagcctgaacacatcttgtgtgcattggagatcttcagaaataacagacaaaggtccttgcactccctgctgggcttaacatcttgcgggtggggagtggagacgatcataaagaaaccggcaaagtctacaaactattctttgtacacataaactccctgaatcacaataataaccttatgaaaggttttcccctatttttcaggtgagaaaaaccaaggctcagagagaaggacttgcctaaagtcacacagctatgaaatgtccgaactgggattcaaacccacacctgtcagactccagagcctgtgctccttctctccccggcagcctgtctactaagatgttggcccagctccacatacagtcatctgcctcgccagcagcacatttcagaagctccacaatgtctgaggtcgggggtgtcggtgcccaggggcacagctcactcccacaaggccccgggcagggtgagctctgccctcccttccagcagcctctgaccaggaaggccaagtacacggtcagtctctggccagagcctgcgggaacaggacgtcctggtcctcctgccctggtggggcccagcaagctatttttgggcacgtttattgatgggacacgggtgcccagctggactcctgattcaagaggaaggccccaggctggcccagggtggttctgcttctccaggcccttggctgccttgggacagcaaccatctgctacaccccatgtcaagggtgtagcctgagctggctggctccaggaagagcaagggtccccacgagtgtggatagattttgggggggggtcacacagactacaactatttcccaaaattctggagcctgattaattcataggcaggcagaacacagaatgagtatgacaacaggttttgaggttagacttgagttcaaacccccgctgtgtcctctgctagcaaatttaccgtgggcaagccaggccaactcctggaagctccgtttccctgcctgtgaaataataacaatccttactcacggggagggaatgaagcttgaattagatagcccccacagctcaaagcctggcatacagtaagtactcaataatgaataataactttgcaaataatgattgacagctgacatttattgggagtttagcaggtgtgaggcagtgggctaaattattgacattttaaaaaatctcacttcaccccccccaacgattcctgggggaaggtgaatgatgcacttacaggtgccattatcgttcccttttacagataagaaaacagttcacaaagaggaatgatttgcccgatatcacccagcagatgtgtggcagaaaaacccgctggatgcgtggcagaaaaacccgcctttgaactccggccctaagagaggacagggccaggctgcagagctgtgcctcacgccctcctttccctcccacaaggactggttacaaagaccccgtcaacacctaagtccacgccgtatcgtgcacccctcagtcaccccctgtcccagaaggtaacctcctgggccttcctgttgatggaaattcagacaccaacatccctgaatattcccttgacccttcttcctgccattggggttattttgttttcctggttcatcggcaagaaatctgcaagaaactggctgggttggcaaaggctctgggctaacttggaggccgctatgctgtgtatgctggggtgggtgctgggggcctggcgggcaggggagggcagaggctcgcatgccggggcacctcaaggcccaaagtcaatgcagtgtttccttggtaaagtgccctcctggcctgcacctgcttacaattcaacgcagtgccctgagggtacattgcagcctcctttggctgaaagaagcagccttttgtgatctatcctctgcctttgtagccttctttcccaccactggatcccctccaaaaagaacgtgctttgccctgcttccaggcctttggccctgctgtgccctcctcctggaccacctttcctccatggttctcttaccacgtgcttcttctcctggtacttcaggactcctacactgtgaggccctcccagaatccccccagccccctacttggggttgccactgcgacagagggacattgcttccagaactacgttgtactctagactacaaagcccagctggtgagctgacacctccatgtaggtttcacgcaggcccctaacttcacaaagcggaatactccatttatttccctcctgaaaccccagccctgcccacctgtcttcccagctcaggaaacagtgctgccctgttcagaccaggtcctggtggccccttggttcctgtttccctcaccccacacatcccaaatcttgctgacttgactgccaaatacatcccaaatccatgcccttgttgccactttcacagctaccaccgaggtgcaggcttgccactgtccttgcccacctgaaccgtggcagtgagctcctcctccctggtctcctggcttccagctttgctccactcaatccacacagtcagaggaaatatttcaaaagacaaaccagctgggcgcagtggctcacgcctaataccagcactttgggaggccgaggcgggtggatcacctgaggtcaggagttcgagaccagcctggccaacatggcgaaaccccgtctctactaaaaatacaaataattagccaggctttgtggcttgtgcctataatcccagctactcgggaggctaagggaggagaatcgcttgaaccctgaggcgaaggttgcagtgagctgagacggcgccattgcagtccagcctgggccacaagactgaggctccatctcaaaaaaaaaaaaaagaaagaaagaaaaaagaaaaaaaaatctggtttactgctaaatgtttaatgacaccttctcaacaagggggagccctgatttttacatgtatccatttcggtggtgtaaatagtcccaccatggtccatttggagctaccagtgtgacttactgagcatggcattgggaagaacttgttgtactatttccaccgtgggatatggcatatgatatgatacaacacaacagacgtcaatcacttcaacaacacagagaacagtgaaatggtgagaaagtggtgatctgtgagcagttgttacctttgtttttgttgtaacttatttaactggaagttcgtgcaatttaattcttagcgatggctgtgtgtgacaactagcttgcagaattcgtgagccagtaggaggtggtgccagcaaccccactggttgaaagcgacacgagggcaaggatgtttccacattgttcccggccgtttcctggggcctggaacagtagaaggagctcagggtaggtgttcaggccgcatttgttgactattttatagtgcacctgtttgcatcagagagcacaaactgtttgcctcaacttgacttcatgggctgagtccagcccacaagcaggtgtcatttggctctcagaatgttttggacatttttacaaaatttattgccaacgtttaaaagtcaagggttttgttttttttttttatgaaatctcacataaacctagatgtgtagcttctcctggaaaatcagaagctctggacccgactcccttatgacaacagaggctggagcggaggggcgcgcagccagccccttcagactgggcatgggctcgccagtttccgcaggccccacccctacccgcagtctcacaccacgcccacttcattcgttcacgtaacctgctgggcctgcggatatttaagttgcaactgccatcttcgcctccatcttagcacttgtcacagtgtgggcccgtcacagtgtccctgccagacagtgagcaccttggggacaggctctgtgagggagccccccggggtccccactcctggtacatagtaggtccacaggttctggaactagatgaaatgtttgttgtccagtgaatgccagcccccacccagctatccgaattggggcacgcactaaactcaagccccgaccggaatgtgacaaagaggttggccgaggccagggtttaaaaataccccagggctggtcagctgcgaggtgcttggaggtgttgaaacaaccaggccaacgctggctggaggccagtgcacccactttgctctgtgtgatgtgggctaatgggaggggtcactagcaggtcctggcgtgcgggggtggggagtgggaggagtaggtgcagccccctcccccacagccctgcttgggaaaggtcagagatgtttataaacagcatggggtgacatgacataatttcacataaagggttaccaggcagggcatggacacagggcggcctcctctgatgtttccacgccgcggtctcctggcatcaagaaagccgggatgctgctagcactgtggtctccccacggccttcagaaccatggcccagcccgctggagccaggcttaaaaataacgctcccagcacagtctcctgggggacagccagcatgggggctggacagggaaggaacaagctctgctggagcgcccactggatgccaggcacgtcagaggcatgagctcatggagctgcacacaggccttgggagggagggactgtcatccagatggggaaactgaggctcaggagtggtgccactggctcagtgtttcccagcaagtggcaatgctgccatgccaatccatgagacaagagtgacaagaaggcaggctctgtgtcacgccgctgttcccgagtccctggcacagcgtttggccttagcaagcctcaggaggcagctcccatggaacttgtccaggatcgaaacccgctctcccaccacagcttgtctccgtcaagggcagcccatccttccagatgctcagggcggataccagggcatcatcctcaactcctctttttctctcacccccacacctggtgcttgctgctccatccaaacacagccgcccctccctgccctggcccagccccacctctctcacctgacccctgcaggagcctccttcctggtctcctgcttccaccctcaccctaacagtcttgcctccatcagtgtccaaggtaacacactagactcgtatcatccatcacctgaatgtattaggatgcaacagtgaatagaacacacatgtccccgtcagcgtggagctgacattacggaatgggggaggaagggggcatcagccttcacaggtaaattaaatagatcatgtttccaatggcagtgagtactaaggagaaaaataagccggggaaggaggaggggaacatcagagaggaataaatctaaatagggagtgggggtgcagggcaggaaaggtctcactgagcaaatatttgagtacggcttgaaagagatgagggattgggcaatggggatttccagaggaagggcattcttggtagaggaaacagcaagtgcaaaggcccgaggccggaccgtgcctggcatgagcgaggatggcagagaagaggccagtgtggctgcagcagaatgagtgaggggcagcgtgggaggaagtgagttcagaggggtgaagggcagcgcccatagaaccttgcacgtcgaaggaaagacttagctttcctctggggtaggtgagagccatggagggttctgaacagaagagggcacagtctgacttcgtttctgaaagaatctctccagctgggtgtagaggatgggctgtcaggagccagggggaaggggacagtcagggtgactgcagtggttcatgcagaagagaatggtgaatgggcccaaggggtggctgtggaggtgaagaggcggggagaacggatcttggactcctgatctgttctaaggtggagctgctggggcatatgctgctggactagatgcgatcaatagaaatcaagaagccaaggatgtttgggtttctgctaacacaggaacagaaaaccaaacactgcatgttctcacttataagtgggagctgaacgatgagaacacatggacacagggaggggaacaacactggggcctgttgtgggggtggggagggagagcatcatgataaatagcgaatgcttgccgagcttaatagctaggggatgggttgatgggtgcagcaaaccgcgatggcacatgttcacctatgtgacaaacctgcacggcctgcatatgtaccccggaacttaaaatctaaaaataaaagccaaggatggctccaaggttccagatagagcagccggaaggatggagcttctgccttacagagatgaccaagcaccaagctgggctctgggaaggatgggagtgaggcggcggcccttccccggggggcaccggatcctgtgtgaaggtcatcctcaatacagtgggctttgctttatgaaattccctgctgattcacatcaggattcttctccagctcctccttcccatccctgtccctgagtcccttgtaaattttgcaggagccaccaggtccctcctcccctcgattcctgaagagcaacaaacgcttctatagcactcatgtgcctggcaggatcctagccctttacttaaactttgtgaactcatctgatcatcacagcagttccaggagctggggactcttattacacttatttcataaatggagaaaaaaggcccagagaggttaagtcacttgtccaggatcacacagctccaagtggtagaggcaggatatgatcccaggcagtcaggcctaggcctcatgctgttaaccactacacttactatctcacccttggctatgaggagtcaaactgggcttgagagattgggtgaggggagagggcttcagccaccccttccacataaaagaaacagttgccgttttctgagtacctctcctgtgcctagttctatacccaggcttcctctattctgcatatcaacagaaggggtatcacaaggattgtacccattctacagataagaaaaccaaggctcagagaggggaaaagccatgtccacagttacagccaggactgagaatgtggaactctgggactccagaccccattctgtcccctcctccacactgcctgtgcttgtcacccgcttcctgccttggtggtgaggggggtgctcaggggtcaatggccgcactgcattttcttcttgctggaagcagaaggaggacaggagaagtgacacattgcacagctgcacggattcccgctctcagggctcgtagattttgtctggcacaatcaacatgtctgaggccagctctgggccaggtgctggagagaccgagataggaacacagagtggagggtgagaaagatggaggccctaggtggctttgatgagatagacagtggtggggttgttacagaagttcagagaagccgctcagaggagcaggtgcacatgaaccttgtgtcctggcagcttcttcacttctctggatctcagtttccatctctgtgacacggggtggtcatacctgccaccccatctcacagagctggtcaggactaaaggtgagcgccaagggggcatgcactatctccaccttgccctctgctgtcttccaggacagaaagagcacaggccccagcttgttgtaggcattctggggacctggcacacaggaggtgctcagggcctgctggacgtatggaaataaagaaataaacttctttgggacttattttcttcccccataaagtgaattatttccatgcacccatgcactttacaaagacatagaccctctcaaccacctggcaaggcgagtactaagatcatctttgcttaacaggtaagaaaaacggacacctagagaagctacgagatttcaccaaggtcctagagctaagaagggatggagctagcatttgaatttcactccctctgcctcctcagcattcacagaactaattgcagaactaaactaataacagcttgtgttttgtggagcatttattacatgccatgcgttattccagacacttcacatatattaactaatattagtatctacctcaaatgtgtgggagagatgatatttccttcccattttacccataaagaaagaggttaaggggcaggagcagtggcttaggcttgtagtcccagcactttgggaggccaggtgttcgagaccagcctggggaacatagcaagacccccatctctacaaaaaacaaaaaattagctgggtgtgctggatcatacctatagtcccagctgcttgggacgctgaagtgggaggattgcttgagcccaggaggtcaaggctgcagtgagctgtgattgtgccactgcattccagccttgtctcaaagtaaaatttaaaaaaaagaaagaggttggccaggtgcggtggctcatgcctataatcccagtactttgggaggccaaggcaggtggatcacctgagatcaggagttcaagaccagcctgaccaaccaacatggcaaaatcctgtctctactaaaaatacaaaaattagctgggcatggtggcaggcttctgtagtcccagctactcgggaggctgaggcaggagaatcacttgaacccgggaggcggaggttgcagtgagctgagattgtgccactgcactctagcatgggcgacagagcaagactcagtctcaaaaaagaaaaaaaaaaagtaaataaataaataaataaatgaaaaagaaaaaagaaagaggttaagtaacttgtgcaaagtcacaagtaatttgcaaagccaggattcaaactcaggcagtctggctccagagtccatggtcttaaatcacaacaccctgcaggagagggttggcaatgtcatcccaggcacagagtctggcacacggggagcacttattggattgtgaaaacctagcaaaccacgaacagacaagcagggctttcctattctgaaccacactgaggtctcccttaagaattcacttatttccatttcttcctgtgagtcccacttgacagagaagaagctgcccacagaccattttcccccttcttccccctccctctaggaaaattctgggcagcatccaccaggtcacagctgccagccagaggactggctagagcagagtttggccaggttatcgggtttcgtggtcagccaccttcgcccctgaccagagctgtctttccaaaacagaacattcagtcactgcctgtccctgcgcccagctgtccttgtgccccgaccttgctctctgcccaccggcccagggtttttcctcgtattcttgtctcttactgatatcttgcaaagatgaccggagcagaggaaagaaagtcagggagcagcctgagagaaacgatgaggagacagagacagagaaagaagagacagagaaagaggtgacagatggacagaggagaaagaggagacaagaaagacagagaaagaggagacagaggcgacagacggacagagaaagacagagaaagaagagacagaaagacagagaaagaggagacagagatggagagacagagctggagagaaagacagagacaggagggccctgcaggtgccatctgccctccaaagctgtctcgagggcagggtttgtaaccttgcatctccacccaatgcatcttgacctcccaaggctgcagcatcttctcccaacagcccccatcctgccaccagcccagcaggtcctaagagacctcgttttccttcccccctcacctccatgcacaatccctcacctaactaactcctccttatctcccttcctccaggaagccctccttgcccccacagcccctctatgtaccctgattacacctccctcatactttgtggttcattgataggttcgcctcctccactggaatggcagctcctcgagggcagggtctggatcggtctggctcgccctgcatccctgcactcagcccagtgcctgactcatagtaggtgctcaataaatgttggttgaaggaaggattaagccagctgctatgtgtcagctccttggagaatccttccctggtatggcttacaactgtttggacttcatcgtgtgattatttgatttagggtctgcgtggcctctggtccgaagaaggcaggatctgagtctgctgcattcacccttgtcttcccagcacctggaacagtgcctggcacagagtaggtgcttcagtattggttgaatgaatgaatggatgcatgagcaaatgaattaaccattagccctctggaggttttgaatcatattttttaacccatttgaagcagttcaaatgttccccattgcctttcaaatcagaccccaagtcctgtcaagacctaggaggctctgcaagatctggcccctgccacgtctccagcctctgcccttctcccgccacccctacaggcaccgatgtctctagggtgcccggcgtggtagcagttctcatccccctccacaccccaccataagtcatgtcaacagagctgggttggtttatttgtttttttctatgaacaagactgcctagaaaaatggagcacttttgcacaaacaacctcaatgtcacccatggaccttggtcactgtgggacagtctccaaggtttggccggccagcttcccagggcactgacctgagaaagggtttgcgccctggtcgctccgtccatctcccacccgaccctctaaagggctggctggctgggtgggaggggtgtccttggagcccctgagtctgaccttcatgttctgcaggaagccaggggaggggacccaatggagtggaccccaccacatcctttaggctcagaccaggccttacaccctccagaaagctgccttggccactttcctggcatctctggactcctgttctcaccctaattgcatctcatatcatgcttggctgaaattctctactggacagtttcttccactggactgtgctccaagtgcttaaggccaagtcttttctatcttggtgtccccagagcccagatctggcctatgagggtcatcagcaaacatgcagtgaatgaacaaaggattattgaacaagcgcttcctgccttagtgcatgctgacctctgtctttcttactaggatggggtcccaaggaccttgtctcttttatctttgctcctcagtgtctaacactgcttgacacatcagtggcaccatgaaacatgtgtggaataaacaaacaaggccttcctaccatccatcatatctgcctctcctcctggactgggagcactatgaggtcaaggaccaagccttatttatttctagctcctctgagtctagcactggacctggtacaaaagagatgcttggtaggtacttactggatggatggatggatggatggatggatggatggatggatggatggagttgaaactgatggatcaatggaggaatgaatggaaggttggacagagtaaatgaatagaatgggcggatggaagtgcaggtgggtggatggatggcagatgggtgaatgaaaggctggatagataaatactacagtccaggtcgtgaacgtgggaaatattgctttctaccccccccacacaaaagccaccattttagaagagctaaaatcattttagaacagctaaaatgaggccagagaatgactcagctagagtttctatgagagatatttaaaagaaaaaaaaatgtgagaaagacgggtctcggaggctctgaacttcttaagcaaaaccctgtaagttggccgtgctctcttgcagcgtttatgtgatattttatggagggcctgccatatttagtgcccttgggtttggtctggaagttgaacgaaatttcagatgtggaccctgaccccaggttgctcagagtcagatatatgcccattcatcctcaatgcgtcttcttgtcggggtgtccaaagaacaaaggtttgggaaacaaacacagatttgtatcctgacttcttttctgtgtgacctcaagcaagtatcttggcttctctgaaccctggtttgctcatcctgctttgcagggttgttgcaatcacacaacaagcccatgcttatcaaatgctgagcccaggctgggattgctgttgatgattggtaaacactaaactgggcctcagtgtgcgaagctgctgacttgctgtgtgatgttgtcggaatgtcgggacttttctgttccttcatttcagctcagtggcattcatccttaacaagggccgtgaactaaagaagagctcaagctggggaacccagtagacctgggtttgggatcctttgctccccggctgcatggtttcagacaagccaccgtgtctgtctgaacctcagttcctgcatctacactgcagacctccttgctgtttctcaagcacagctgtcacccctgcacccaagctctcctttggcaagagagccatagaaagtgagttcctggcatccaccttggggacgtgtgggcttctaaatgcggtgcaccttgaggcactccagagcaaagaggggtgcagagggatctggaagggcaaacagaagacacctgtcttctcaccctgtctggaagaggacccccattccatgtggtcccactagcctactgatttatgttgccaatagtttataccacatggctttatagaacatgtttattcagcggggcacggtggctcgcacgtggaatcccagcactttgggaggccggggcagatcgcttgaggccgggagtttgagaccagcctgggcaacgtggtgaaaccccatcactactcaaattacaaaaattagccaggcatggtggcacatacctgtaatcccagctactcaggaggctgaggcaggagaattgcttgaacccaggaggtggaggttgcagtgagccgagatcgtgccgctgtaccccagcctgggtgacagagtgagaccctgtctcaaaacaacaacaacaaaagaacgtgtgtattcatttatttttcctagtctaactccccacctgatactcctgtccgctccatgagaggagagtttctgtgcattttttttttttgagatggagtctcactctgtcactcaggctggagtgcaatggcacggtctctgctcactgcaatctccgcctccagggttcaagtgattctccagcctcagcctcccaagtacctgggaccacaggcacgtgccactacacctggctaatttttgtatttttagtagagatggggtttcaccatgttggccaggctggtctcgaactcctgacctgttaatctgccccccctcggcctcccgaagtgctgagattacaggcgtgagccaccgcgcccggtctacgtttctgtatgtcttgattgctttttcatcctcgggttctaaagcctagacaggcacatggtctttgttaagtaaatgtgttgaataaatgcatgtatgaatggattagcacataaagaaatgaatgcatgaatggataggtgcatgaatagctgggcccaacagaatcagttaagaggcttaaccacacacacactcacacacacacacagacacaagcacacgcacacacaaacacacacacctacatacacatacagaggtgcttgagccctgctccaaaaataaaaataagaatcaacccttaatgatcacttactcattaagtataccaggcgccacgtttagcctgtgatgtagggcatttcactgaatcctcatgaccaccctctgcggtagggactaatgctatacttttttcatatgtcaaccctgaggctcagagaggtaaagtcactgaccccaggtcacacagccaagaggtggaggagccaaaattgaattcaagatctatttgattccagaaccatgcctgaccttactgggccagcggggtcacctctgaatcaagatttttaggattccccaggtgattctgatgcacagccaggttgagaactcctgggccagagcattgaggtttgggggagtctgctggctttgggaccagctgatccagcccctgtgctgcctcgcagcctggttccttatctctgacacaggcgtgatggcagcgcctacctcaggggatttcaggaggacctaatgaattaatccacacaacgtgttaagcagaacacagtaagcacttctcacagctcccctgggtgcagacagatgcattcccaacctcctagtgcagtgcctgggacaagctggaaagggcatctcagcagcattcgagaggctatcgcatctaagagtgaacgggaatgctatagtaattccatcccccagaaaaacatcttgcagaaatactcgcacacgtccacagagttgtgtgccctacagaccacgacagtgtggcttgtgatagcaaaagccaggaagcaggcccaatagacatgtttagggcagggctctccacttcagcaaggtggacgtttggggtcacataattccctgttgtgggggctgtcctgggcgttgtgggatgtttagcagaatccctggcttctaccatctagatgccagcagcatgtcactactccaagttgtgatgacagaatatgtctccaaaatcgctgaatgtccccagcattgctgaatgtcccctggaggaaaaaaaaaaaatcaccccatccaagtggagaagtttgtgacatgcccaaggagatggaactcatatttcagcaaagctgtgactttatcctgcactaagtcccaggtcacacttttcctatttgctttttgtggattccttagactttgctccattcacaatcatgtgttctatgactagagataatttcatttcttcttttcccatctggctgccttggcacgtttgaggacagaacttgcacaacacaaattgtagctcaagtggattatgtaatctgcacagggatgctttttcgggaagttaactttgttcaaatattgaaaattcgtaaaatagaagaatatgaatttttttaatgggaccacccacagagggcaattttctcacagtttgctcgtctgagtagctttctccattttgaaattttattataaagttgcaatcacactgtatgtacaatttcaaatcctgttagtctcaaagtcttcaaaatcatacttctcgtgttattacaaaattttctttgacgttctctttaattgttgtctattgtttctctcttatcctctgatcttctctaatccttaataatgaaaattgcaggctgagcatggtggctcacgcctgtaatcccagcactttgggaggctgaggtgagcggatcacctgaggtcaggagttcaagaccagcctggccaacatggagaagccctgtctctacaaaaaatacaaaaaaagccagatgtggtggtgcatgcctataatcccaggtactcaagaagctgaggcaggagaatcgcttgaacccaggaattggaggttgtggtgagccaagatggcaccattgcactcctgcctaggcaacaagaatgaaactccatctctgaaaaaataaataaataatggaaattgcaagctttcgctgggcacgtgaccacccagaagaaaatctacacttcccagcctctcttgcagctaggtgtccatgtggccaatgggatataagtaacgtctaagtaatgtctgtgggaaggggtgcctctactttgtcccatcctccttgctggctggagtgcagatgtgatggccggaacctgagtggccatcttgggacaaggcggagcaatgagagaaaaggacgctgagtccccagtgaatttgtacagccaccctactagtcctagactgccacctccacgcatcttttaggtaagaagcaaatttctggctgggcgtggtggctcatgcctgtaattccagcactttgggaggccgaggtgggcagatcacgaggttaggattttgagaccagcctgaccaacatggtgaaaccccgtctctactaaaaatacaaaaattagctgggcgtggtggcaggcgcctgtattcccagctactcgggagcctgaggcaggagaatcacttgaacccctggaggcagaggttgcagtgagctgcgatcctgccgttgtactccagcctgggcgacagagcaagactccatctcaaaaaaaataaaaaaaatttcatttgagcccctgttattctggcttttctaacattcaaaggtgaacctaatcctaagtattacactaatattttgtgcagaaggtgtctctaacatccttttaggaaacatttcctgattaacttaaacattccctgcttattgggcatttaagtagattctgattcctcactattcttgtcaattcttttttttttttttttttttgagatggagtctcactctgctgcccaggctgcagtatagcagtatgatctcggctcactgcaatctgtgcctcctgggttcaagcgattctcctgcctcagcctccggagtagccggtattacaggcgcctgccaccatgcctggctaatttttgtatttttagtggagacaaggtttcaccatgttggccgagctggtctcgaactcctggcttcaagtgatctgcccaccttggcctcccaaagtgctgggattacaggcgtgagccaccacgcccagccttactcttgtcaattctgtcgtgaatgtctttgtccactgtcactattcatgattatttccttagtacagaatcccagaagaagggtttgggggtcaaagaacatgaacattcttaaagctgtcagtgcctgtcacccaactgccttccaaaatggttcagctgacataatgccctcctcctccagcaggggatgtgaggacccattttgggaccagggtaaagatgacaacattccacatcattccctccagcagctgaaaatgagtccgagatagtcatttttggatagttcttaaatacaacatatggatgagcagtcattaaccacgaagcttaggagacctagtgtgatctagtgtcaatctgggtttcttagttgcgagggacagaatgcacccctctggctagtttacacagaaaaggagtttatcaaaggttattaggtggttcataggaccctcaggggagttcctgagtcaggactgggggcaacacagctaggaatgaggctggaatttgatggagagctgccccagtgagccccacttctactcaaggacgcccccactgcatcctccagacccaggttctctttcccacctcttttgtcctgttgttctcttttaattggaagcctctcacaggggagcccacttcacactcccgcacccgggaggctcagggaggctaggaaagcaagttttctggcaattcctttgagagatgtgatctactaaggtaggaaattccctgaagggtgaccgcagggtgtgggccagaaagtagggcaaaggtcagctccttcggcaaagacggctgggcttgtgggaagaatccaaaaaggtttctagcaacaccttctccatttctcctccactgagggcaagagaacagcagagagaagtaaatgacaaaagtgtcattcccatttgtgtcacccttggggttcacccaactctgcagaggctaagttagagtggggaccttgagatctgtcctcgcttcaccaacctgaggccagcaagccaacgcggatgtctctatctgatggatgtgtgtctcctggacccctgaccacatccttcaaggagacgtttgtgaaggatgtgtttgccttgtccactgttgcactgaacaacaccagcatccggacaagccctggcacacagtaggtgctcaatagataaatctcgaatgaataaatgatggcactggactctctgccttggaagaaaccttggagtctagagttaccatggattgactcaaccagtatttcctgagcacctaccatgctccaggccctattttaggtgctgcggatactgcaggaaagaaaagaaagtcccagtccctgtcttcagagtgaaggagatgggcaatccattttaaaacgccaaaaatattcatataacacagcacaacacaacataacatcatataatctgatctaatacaataccaagtaaaatgttttacaaggaaatgtaaaactggataagtgatttggagatgctcatttagaaaaataattgaggaaggcctctctgagaaggtgatgttcaagcagagatctgcggtaggaagggagtgagctgagcaaatatgggagggaagtgtattctgggcagagagagcagccggcacaaaggccctgaggcaggaatgaatgagcttggcgtgtgccctttgtggtgaggcggtcagtgaggcaagggttacaccaagtttcccaacttcagcaaatctacagaacccttaactggcggaaacaggaggtagggagggatgagttcttcactcttaagcttctctgggaaaacatgatgtcagggacagacagtaaatcttgacttgtcccagaaaacaatgggcccatgtaaccagtgaagtgttagcctgaaagtaaccggccaaagggctggggtgtgggtgggtcatatggaatttgttaacagatctgcattagaaaaagagcttcccagttgggggcagcagaagcttctggctaacatcaaaaagatgtttattgtggtgattctgtgcagacatgaaaaatggagattcgccacacagagatgtggaaagatgtccccaatacgttaagtgaaaaaataggccacaggatagtattatatattgtacaatcccttttgaaaattcactagtcatttattcagaaaatattcattatggacctaatgtggtgtggaagacccagacgcggtcttgcctgcctcctggaactgaccgcacagtggggaaggcagatgacgatcagatcagtacacaaacatatcatccaaacctttgatcagcactaaggaaagatacctggtgctaccagaatgtgcacacacatcaagtgatggaaaaagcctgcgaggatgtgctccaaaatgtcaaagtggtagtaaggtttcaggagattccactttccttttttgtttgttttttgggatggggtcttactctgtcacccaggctggagtgcagtggcatgatcatggctcactgcagcctcgacctcctgggctcaagccatcctcccaccttagcctcccgagtagctgggaccacaggcgtgcaccagcacacccggctaacttctttttttctttttttaattttgtagagatgaaggtcttgctatgttgaccaggctgatcttgaactcctgggatcaagtaatcctcctgtttcagcctctcaaagtgctgggattacaggcatgcgttaccacacctggcttgattccacttttcttatgctcctctttcttttgattgtctgtaggttctgattttttaaaataaatgtcatgatttataatcgagtgaataaaaaaaaaactcaaaatgaataggagcaggagagctggaactcacgggtctgcagaggacttagacccagggaaggaagaatacacaagaaaccaatcaacagaggctggagtaggaggtatcctcacttctccctggataccttttgaaccttttgaatatgtaagtattcaaataatagtaataagcaaaggtattttaaaatgaaactttgagtcaagttttattttcgtgaaaaatgaaaaaacagacaacagtaggatctcaatttaaatacgcgagctgagctgaattcccgtgcacatcttagagtggttctctctgggtcacctttttagttttcttctttgtacttttctgtgtctcctatatttaaaataagaagaataaaaaaagacgagaaaaaaagactaccgaatatagaccatttaccacgggcaagatcccattctgggtgctttacaaacatgcttttgcttcatccccatgaccttctcattccttactttcatttgacagatgaggaaactgaggctcagagcacaaagtcaccggccagggtcacccggccggatttgacccgcgttgatcagatcctaaagtctgtctctaaactagaaagctcaagtacccttggtatgtccttcaaggaaacgactttgctttgaaaatcagggggaaaaaataaacaaaccaaacaagaaatatgacatttttttaaaccacttatttaagctctgatgggacctgagaccagccgagcttggggagggtttctcggcagggcactgtttgtgttgtgggtggggctgtcctgcctggcagtcccccatggcacatccctgcctgctcgtcagccatgttcccctgtcactgtgacactcagatcccccatctctgccagcctcccctccttgaagactgctggcctagacactgcagtgacactgaattcctgctggggcctcgctcctgttgtcctgtgagccactgtgggttgacaccccctgcagacctgagaagcaggtgcctcaatggctttgttttacaaggagactcagagagggctgggtgacttgtcacacagccaagacttggccccatgcaatactgcctaccctctgggaccaagtcttttgtggttgtggggtcgaagcaggggaagggaaaggcgagtggcctgcagccccaggctcagagggaaggcagccacaaagcgcggtccactctccagccagctgagctaggccgggagaagtgaagctttgctgccaggctgggtaggccaggccgggcggcgggcaggcggccactacagtggggaccgggaagtcgagcactccctctcgcctgcccggcagtgtcccatggccgcccgccaggccccgcctgacgtcagggtctgaccagggacataatgtgctggcgtggggacaagggctgactgcagagagacagagccgcaaggcggggcggccaggggaggcgggcaggcagaggaggagagagagaaagggagagagagaaacaggcagagtgagagagagagagcgagagacaggggatgggaaagagaaacacaaacagatggagagagaaggaaacagagggagggagagagaccgagaaagtgaaaaagagaaacagacagaaaagagacacagagaaggagaaaaacacaactaggaagatgttcagggaaagctggagagacagcaagagccagagagacagcaagagccagagagaggaaagtggaggtgctgggggggaaatgacagagagaggaggcctagcaggggctgtgcggttaagggcaggtgcttgggagaccccagacctgggctggggctttgactctgcccctgtgagctgttgactcacctctgagagcctccactccttacctggtgcaatgggagtctgagtaacagggcttcgctcatctggggaggggacagagcccctttccatgatgcgagagggagaacaggagtcagatctgtgtaaagtactttggcagagccctgcatgtagtaagtgctcaataaattggaggtgaaaattgagaaagagttgggaagtgggaaatggaatgccagagtgtgagtggatgggggtcgcccccatggacagaaactctcgctccacagcactcccttccctgtagccttggaacaacccccttcctgtccctgcatggcttcagcttgaggccaccagcacagaccttggcctggccttgcctgtcttggggcccaaccccctgcttatgggttcaagaaggccatgatcccaaggccatcgcgtcaccaaagccaagcaaggccagaccctggtcacttctggctttccagcctcgtcacccctcagccgcttaattgttaaatggcctggcagggctgagggactgagccagccgcctgtctgggtgggggcagccgttcccgcatgtcctccattagtgcaggggcacacacgccagaggcctcaggtagcacttgctgaggtgaggatgcaaagatccctttctctagctcccactattcccagaagccttcatcagcctcagcctcggcctcaaattctcactgtgtgccaggcatgcttctgagcgcttcacaggattaatctacttaatcctcctgacagccccaagagatgaagtgctaacattatctcattttacagatgaagacgctgaggctcagagagctggagtcactggtccaagcccacctgctaaggagtggcagggccaggcagccacttaaccacagagcagctacgattccctgcacaacttgagcagcagcctgtgccgggtggcaacacaagcgcccggatcatctgaccagggagcagtccttggctgggagtgattttgcccccacaggagatattaggctatatgtggggacatttggggttgtcacaactggagagaagttactggcatctgatgggtggaggccagggatgctgttcagtgccctacagtgcacaagacaacccccatagcagagaattatccagctccaaatgtcagtagcaccaaagttaagaaccttctataaggtaaattctattacaatctccatgttataaatgtggaaactgaggcacagagagagggtgggactataaggtaagttctgttacaatctccatgttatagatgtggaaactgaggcacagagagagggtgccacttgcacaagaagcccacttcatgccctgctcttccataagaccccactgccaatctgcattaagacacccctgcctccattcgaggccttctgagtcctcacttgctcagtacagacaatgcttcgcatcctctcaatatatgaaggtcatcttagtcattgacagaaaaaaaagatcaagccacaaagtcactgggaatgtacgaatgccttaaaatgaatttatattttattcatggcagcattgagggacatttgaaataaaccaaatatggattcatggagcaagtattttctgagcacctactaagtgccaggccctgtccatggtgctggagatacagccgagaaccagacagatccagcccctcctgggtctttaggaggtgacagtctggtggggaaggcagatgatagacaagaaaacaaacacacaaccaaggtcacttttgactgtgtgaaatgcaactgtggggcaggagaagggccgttctagggagggtgatgtccaacagggcctctctgagaagatgagacccaaaggaagagaaaggtccagtcttaggaagaggcaggaatgaaaagttccaggcaacagagcacgtgcagtggctcacatctgtaatcccaacactttgggaggctgaggcaggtggatcacctgaggtcaggagttcgagaccagcctggccaacatggtgaaatcccctctctactaaaaatacaaaaattagccaggcgtggtggcgcacacttgtaatcccagctacttgggaggttgaagcaggagaattgcttgaacctgggaggcagaggttgcagtgagctgagattgtgccactgcactccagcctgggtgacacttctgagcttctgagcactttttttttgagacggagcaaagctccgtctcaaaaaaaagaaagaaaggaaaaggaaaggaaaggaaaggggatggaagggaggggggaggagaggagaggagaagaaagggaaaaggggaaaggaaaggggaaaggaaaggggaacaggaaagggaagagaacaagaagagaagagaaaaaagaaaagagaagaaaagaaaagaagacctggcacggtggctcacgcctgtaatcccagcactttgggaggccgaggcaggcggatcacaaggtcaggagtttgagaccagcctggccaacatagtgaaacccatctctactaaaaatacaaaaattagccgggcgtggtggcgggcgcctgtagtcccagctactcgggaggctgaggcagtagaatcgcttgaacccgggaggcagaggttgcagtgagccgagatcacaccactgcactccagcctgggcaacagagcaagactctgtctcaaaaagaaaaaagaaaaagaaaagaaaagaaatgaaatgaaaagtcccaggtatagggaacagcatgtgccaaggctctgacgcaagtgtttgcctggagtgttgaagtacaagcaggaggccagtgactggagccaagtgaggcaggagagaagaagatgagatggggaagtcacaagtgaagagatgtgtgataccatgtgaccactataagggctttgcatgtaggaggtgggagccatagcaaggttttgaggaggaggcacagggtctgattcaggttctattaggatcatcttgaatgctttggttagctgaatagtggccttccaaagatgttcatgtcttaattccccgaatctgtgagtgttactttatgtggcaaaaggaacttggcagctgtgattcagtgaaggctctgaagatgggaggattatcttggatcacccaggtggggccaattaatcacaggagtccttataccacgaggcagatggagacctgcctacagaggaggagaaggcaaagaggagagagaatgacagaaacagagactgcagtgatgtgctttgagagtggagggtggggccataagccaagggccatgagcatccactagaagctgaaacagacaaggagacagattctctcctggagcctccagaaggaagtggtcccaccaacacttcgacttctcacctccagaactttaagaggataaatatgtgttgttttcagccactaagttagtggtcatttgttttggcgacaagaggaactgagtgtgatgcagtggggaggatagactgtaggagggtgagggtgggagcaggaggacccatgtggagaggctactgcgattgtccaggcaggaaagaatggcagatgaagagaagcggatgcctcactcggccatcgctgggctggtgcctaggacacggagctggccactgcatggttcttgttttgaagaagactccagctagaagaggctcaagaacagttctgggaaatgggaaggatgggcttagctgggctagaacctcatgtcggtcaggtctctgtcccagtgtcccctgcagggtggtgtcctgaccatcccggccccgggaaccctcccagggctcccgctccctcactcagcttcagtttgctgtgtgtgtcccatcatcatcccgtgtgctacacctctgtctgtttctccattgtctggacccaaatgaggaaggactttgcctatcctgctcactgcgcatctccagcacccagaaacggcctggcacaaagatgtgctcagcacatacgtattgggtgaatgaaccaacaaatgaacccccattttccaaccaggaaaatggttgaaaactataccaggaaggtgacttactcagcaccacacagtggctaactacagatccaggatttgaacccagaacggactccaaagtttgcactaagtagcctacttccttgtaacaccaatgacactgcctgtgttccagaaattcctactttgtgggagtagtgctgtatccttcttgaggggtcagacactcgaaacacagcacctcggggaacctacaggacaactgacctgctcgaggctattattagatgaggaaaccgaggttcagaggggttggggtcttccctgaggtgcacagccagccggcggcagagcctagagctgggactcaacccttgttggatcccatagctgggggtctctctcatattttccaccttgctctgggtcccagagaaataagaaagactctcctgccctaagaggcagagtaggtgtagatcacactgcccaatgtccgggctgagcctggaggaagcccagcaacacctcaagctggaaacttctgaaaaatgaggctggggggttaggatctagggccctggggtgaaaccccagctttgcccctcccctgctgtgtggcctcaagcaagtgatctcctctctctggcccaggtctcctctaataactccaaccaaaattctggacagagttgataaagccctatagactacattttaaaatcaaaacacccagccgggcctggtggctcacgcctgtaatcccagcactttgggtggctgaggtgggcagatcacctgaggccaggagtttgaggccagcctggccaacatggcaaaaccccatctctactaaaaatacagaaactagccaggtgtggtggcgggtgcttgtaatcccagctacttgggaggctgaggcaggagaatcacttgaacccaggacgcagaggttgcagtgagccaaaatcgcaccattgtgctccagtctgggcgacaaagcgagactccacctcaaaaaattaataaataataataaaataaataaacaaaaaagtaataaataaataaaaatacaaataaattttaaaaattaaaagacccagtgtgtattctagctgacattttatatcagattgtactgcctggggacatacaaatgtagtcataataaaatgtagtaaaccaaatttggaaaaaattaagaaataaaagaggagtttcttttcctctcatgtgaatgaagtccagatgtaggcagtttgggatggatttggtaactctatgaagctctcagtatctcagcttcttcctggacaccagtctgccatctctaggtgtgggccccactttctcatgatccaagatgaaggccactgcaccggccttcacgtctgccttccagaatgacaggatggagaaggaaggatgatgagtaaaaggcaggcatcaactaaatctctaggaaacagtccagaaacctgtcacactactaatttcaaccccttggccagagctcaggcacatggctgcacctagctgcaagggaagctaggaaggtctgtgtttattctgcacagccatgaactcagctaaaagccaatcaaatatttgtaaataaacaaaacaattttagatagtgatgtatcctgggaaagaacaaaacagggtaatctcttggacaatgagggtgggaaaatgcctccctcaggaggcagcacagctgagatataaatgataataaggcctgagggacaagcattccaaacacgaggaacagaaaagcaagctgccttgaggcagaaacaagcctggtattgtaaagaaacagaaaggccagcatggctggaactgggacagggatgcagtgggaggcgggcacagctggtaggaaaggaggtcagagagttcagcaggttagatcctgggagaaacgggaaggccaagggaaaaatctggattttttttttctcctctaagtacagtgaggcaatattagagggttgggctgatatgctatcactaatggagagaatgccgagctcccctggctcctggaggatttgccataacccttctgagcacttcattcactcaccaattcattcctctcataaatattcattgctgacctgctctgtgccaggtactgacttacggcagcagaaatgactcctccagtccccaccctcaggaaaagaagagacagactgagcaaacacaaaagcctataaatacagctcccagatggctgccagtggtttggagggaaggtaaatggggccacaagaggacctgagttcacctggggatgggagggggtttcccactggtggtgatgtttgagctgaaattggaatgataaggacactttgtcttgtggtctggagacggagagaacattccaggtagagggaacagtttgtgcaaagggctggaggcaggaagagagctgcatatatccagaaactcaccaggctctggcctggcaagagttgagaagggtgagagagaaggtgtctcaagatggccctggagaggtgagcagaagtcagatcacagaaagcctggaaggggccaggcgtggggtctcacgcctataatcccagcactttgggaggccgaggtgggcgaatcacttgagatcaggagttcaaggccagactggctaacatggtgaaacctcgtgtccactaaaaatacaaaaattagctaagtgtggtggcacatgcctataatcccagacacttgggaggctgaggcaggagaattgtttgaacccaggatggggaggctgcagtgagccgagatcacgccactgcactccagcctgggcgacacagacagactccatctctaaataaataaataaataaataaataaataaataaatgaaagtctggaaggagggtggggctctcgtgttctgggaggatgatttatgaagaactttgaccccaaatccctgggaggggcctgtggccaatcccagacaagcagggcctggctctccttggacagtgtttacaagctcgctgatgactcggccttctgccttcctgcggtttgctaatcactgggtgctatgtgccgggatgttctcctgctcctcagccctgagagcacactctgactcatgcctcctaccccagccaccccctcccatcaccaccaaggctgccatctccccccgtgacccccaaggccccacagaatcacacgaccctggcaccaggaagtgcacctgtgtctccaatcagaactgcccatttcacagaggaagaaactaaggtcccatgagaaaagcctttccccaagtctcaccccaagacaggaatagcaccagggcccggtcccaggtctcctaacacctggtcctaatttttcccactgtttaatgacagaagagagaaaatgagaagaaaggaagcaggaagaggtggaggagaaagcaaggagggagtgaggagagggagggaaggggagctggaaaagcagtgttcaaatccccaactcctaagtgagccctgggaggggaggggagaggattcgtgtttgttgggcacccactacacgccaggtgcctcgactgtgtcagctccttcagcagaatcctcacaggagaatggatacaattacttactctaaatgctttggaaaacagagaagctgtgcaacccatctaccatcacacagcagttacctggcagagaggagaatggaacccaggtctggctgcaattcctaaccctaagcacactccaggccccaggctgcctccagcccagcctctgctccgctcctctttttgaggcagttgcagcctccacttccagagccgatcagcagaggctttcccccggctgcccacaagccagcagacggatttcctttggcccacagggcattttaattaaatttgagctaatgttcataaatcaagagatttcacataaaaattcagatttctacctcccttaaaacactgtaagatttcactgggctaaatccacattcccacctggcaaccgtcagctggggacaggggtatttgaagtggacacaccagttcccccacactccccaactctccctgctgcctccctggtcctgaggctgaatgtcgggtgccattcatcaaaatgcatacactgttgttttctgagagcagggacgtatttctctgtaactgtatctctttcaaaaagaagaaaacaagtgctaatccaaaaggggtcaagtttcatgaaaaatgggggaatgtctaattctttgcggaaccaagagatactccttcatgcttattatgcagacgaagtgtgcctgagccctcacaccactgcttagcttcctaaaatatttttttttgtgtgtatctgaaattctaatttaactgggcatcctgtattttatctggtaaccctctctagactagtcaccttgctgggtgagtgatcttgattgagcaagtcatttaagttttctgggtttcaggttgttcctcatagacagggttaataacagcatgagaggttgaggtaggaggatcctttgaggccaggagtttgagaccaacctgggcaacatagcgagattccccatctctacaaaaaaaaaaattttttttttttttttttaattagccaggtgtggtggctcattcctataatcctagctacaggggaggctgaggcaggaggattgcttgagcctaggagtttaaggctgcagcgagctgggattacaccactgcagtccagcctgggtaacacagcaagaccctgtctctaaataataataaataacaagaggacctgatgagatattacacattaagagcttaggacagagcctggctcactgtacatgctcagtaaacgtcagctgctggggcagatgacaccagctgcttgcccaacacccattcccttgttcctcactaactgaaccctggttaatggcagccatagtgcctggccccaggggatgaatgtgattggtctagtcaagcatgccacacccattccaagctgccagtgattggaccaaggtgagcatgtgacctgactctagccaatgaggtacaacaagaagtcagcggggatgagtgctccagggagactttctctccctaaggagttggcactactgccgctgttcctccctttttgttttggacacatccattgggaaaaagggatacaggatcccagcccccatcttaagacagtgagcatggccaaggtctaggctggaggactcctgggctgacaatgccaaacttcgttttaagtaaatgatggatgtcgttatggccgaagccatttgctaattggctctatattagccgaagctaattggctctatactgtggcagcccagttatgttactgactagctctgtgcctcagtttccctatatggagaatggagggaacgatagtatccgctacatagggttgttgtaaagttattcaatgagttagcgtaaatgaagtgctaattactctacctggcaagttatactcaccatataattgttagtcattataattcttctgttatttgcatccaagtctttctaaactgatacagtcaaaaattccctgaaagctgtgaattctgaagtttgataatacatcaaagaatccaagccccaaaatataagcaaatgtgcctgtttaaggtgagtcaatgtcaaagattcattcaagaagtttccttatatttcattcaccctgcaaaggatctaagcagattcaacaggctgttcgtcagctcccaagaaggggaggtgggagatgggcgtgtcagccaatcctagaaataagagatagtcccatcatttggaattttgggtagaaactgcaggaccaaaatatggtagcctgagcataagtgtattagttagcaatgccttctgctgaaagcttcagaatgccccagtcacagtgggctaaacagtaaaggcattctattatttcgcagacaacactttgaaagttgatggcttcagggtcaaaaaagcatctcagcaatgtcattcagcatccagctactttcagccttcatatttagccattctgtgttggctttttatcattagccttgtggccccacagtaacaatatagttgccacagccccaagcatcacatcccttaatgaagttcaagataggagtgttgggtggtgagttaaaaagaaaacaatctcggccaggcgcagtggcttacgcctgtaatcccagcactttgggaggctgaggcagggggatcacctgaggtcaggagtccaagaccatcctggccaacgtggtgaaaccccgtctctactaaaaatacaaaaattagctgggcatggtggcacacacctgtagtcccagctactcgggaggctgaggcaggagaatcgcttgaacccgggaggcggaggttgcagtgagccgagattgtgccattgcacttcagcctggcgactgagcaagagtccatctaaaaacaaacaaacaaacaaaaaaacacaaaactctccccttgagctttttttttagagagatttttgttgttgttttggtttggtttttttagataaagacaagttctcactatgctgcccaggctggtctcaaactcctgagctcaaatgatcttcccacctcggcctcccaaagttttaggattacaggcatgagccaccatgcttggcctctccttgagctcttttaatctggaaagaaaatctttcccatgatctccctgaaaggacttcccttcacatttcattggccagaactggtcatatctctgctccacgctgcaaaggaggctggaaaagggaagtgggatagtgtgactggcacagcccaatcttaatccctctcccctggctggacctatcacctcccacccccaaacaaaatcagggctctgctgttgaggactgagggtccagctattaggcagccagtaaagggtgtcaccatagtgtaaacctctgcttcttccagaaatctcactgacagggtaaaagggcacaaacacacagggcagagaacaggcagaggaagagatgatgccactgggttataaaagctggacagcagatgatgggtgagggaacccactgagttggccagagaaaactggcagcaagtgcctgcaggaaggttgggcgaggcagaggcaggtacatggcaccccagagccctgaaaggaccgagacctctgcagggagcactgaaacctgaggggtgagatgaaagtccccaaggaccctcatcccccttcacgctcatggaagagtccaaggtgaagcagttgaaccagggatgccctgaccacaggaatgggggttctacacagaaaacaaatgtaaatctgtctactgaacaatgagatctgcagactccttctcccacctcgccctcaggaacagctgcctaggacaggagataaagactttcctatcttgggaagcacccctgactgaagacaaaagagaaagctcccggaagataatgatttggagttccccaacaaaggaccacggccctacccaggcaccccaccatgtgacaggccctgcccagacacacggagcatgcaaaggtgattaattgcctcacactcaaatatcacagaacatgagacatttgagaactgctaacacgagacacaaacaggaaaaggtcctggggagatgccagtgctccttggctggggacctagtcttggatctgtcagaagctggctgtgtggcctcggcaaagtcctgtcccctctctgggcctcagtttccgtgtagttgaggagaatctttctggccgggaacttgcctcaacatatctcctactggggcatgtgagtcctttgctctgcttgagaaattatcctgaaaaccattgggttattttgtggatctcacctggatgacctaaagggtgtggatttcaagggcagaagaaaacttatcagtcctcacggtgcatgaaattccagcatgctcctctaaaggggacccttgaaacaaataaatttcaatggatgatactcaaaggatgtgtgggaagagcgtggctagagaaggctggctttgagcacttaaatgttgcctggcactttacacacattgtcttatttccttactctctttgtgaccttgaggaaccacttaactatgctgtgccttagtttccctatctgtgaaatggaatgtggttgagactgttagttgtccctaagtatcttcccctagttccatagtaatgaacttgtagctgagcataggactgtctcaataaaaagtacatttcccagcctcccttgcagtcagatgtacccatgtgaccaagttctggccaacgggatgtgactgtaagctatgtggctgatttccaggttgtactttattttattttattttattttattagttaattaatttatttatttttgagagggagtcttgctctgtcaccaggctggagtgcagtggcacaatctcggctcagtgcgacctccacctcctgggttcaagtgattctcctgcctcagcctcccaagtagctgggattataggcacacaccaccatacccagctaatttttatatttttagtagagacgggggggttcacctgactaggatggtctcgatctcctgacctcatgatccccccacctgagcctgccaaagtgctgagattacaggcatgagccactgcacccagcctgtactttatttttttaattattaattttaatttttttagagatgaggtcttgctatgttactcaggctggtctcgaactcctggccttaagtgaccctcccaccttggcctagagttacagaggtgaaccaccatgcccagccaggctgtatttttttttttttttttttagagacagggtctcactttgttgcccaggctggagtgttctggctatttacgggagtgattccactactggatcagcacgggagttttgacctttccgatctgggccatttcagccctccttaggcaacctggtggttcccctctcccagggagatcaccatgttgatactgagcttagtgtaggcacccgattgacacagcgcactacaacccagaactcttggactcaagtgattctcccgcctcagcctcccgagtagctgggacttctggctcacaccactgtgcccagcctaggttgtaccttaaagggaaagggtatgccattccccctttccttttcccactggctggaatgtggaatgtgacaccctaaggaggggaaaatagcaagttagcagcccgggcatgggcagtgggtgtctgcactgtcagccccagcctaacacactgggtgtgaagcctcaatgtgttgagacatgtaaatcacttaccacggggcttggaacaaagttggcattctgaaattgtgagctgttttattattaccatcaacgttatgattataatcatcactccaaatgggcctgtgcaagaaggcctcttaaggcccatttttcagatgagaaaatggagctcagagaggttaagcccctgcccaaatgatcccagggggagggtagcagaaccagatctgccaatctggggaaggagtaaagagaagcagtagagggtggaagggggagcagtcccaagtccccatgccagccccatgcaagtccccatgccagcccataccagccctgtctggttggtttaaggggttttcttcagcgggtctagtgcagtgggtcttaaccagggacacttttgtaccctgggcgacatttgacaatgcccggaggcatttttttttctttttgctttttctttttttttttttgagacagggtcccgttgtctcccaggctggagtgtagtgggcgatctcggcttactgcaacctccacctcctgggttcaagcgattctcgtgccttagcctcctgagtagctgggattacaggcgcccgccaccacgcccagctaatttttgtatttttagtagagacagggtttcaccatgttggctaggctagtctcaaactcctgacctcaagcgatccgcccacctcggcctcccaaagtgctgggattacaggcgtgagccaccgtgcccagccctgcattttcaatcaccgcgactgggagaggaagccaaccgccggccctagtgggtggcagccaggaatgctgctcggtaccctacagcgcacaacacggcccttgccagaaagaatcaacagggctgtgggcgaggagccctggtctcacgagaggttgcccacccctcacctggtgccccaggaggtgggaggcttcgcgggctccaggtcttgggcaggattctctgatttcttcccctggaaggcgtctctctgccctcaccgcatcttcctatcactcgccctctctgtccacacaggcccatttgtggggcaagggattttcatcaagaggaatctctaacctcagcccatccctgcaactcacccctgccgcctgccccgctcccgaggccgggaacaagccccaacagttcagccttcctccccacccacccgttgccagcaaggccagtttccgggtggtgggtggagggcatggtgccatctgaatacggtccagttctccccggtgggggagggagagaagggttttgctcctggaatgcagggcccacaccatcagagctgcccatctgtctgtctatccgtccatgtgagacaagagcggggactgttgagggaactacttccaaatttctcctccctcaattcccaggaggtggtgagccccagccttctaggatggcaggccaggcttccagaaccttccatctcagccacacaaaaccaagagactgaagcgaaaggtaaccccctgaggaactcccgggatttgtgaaaaattcaagagggagtggcgcctgggcctgatccgcatccagaggctgttctgttggtgagcagtggctcatttactgaagtacagactgcaccctgtggccgcggcagccacgcccctctgcacccaccagtcctgttcactggcctaggcttcaggccgccagcacctccatctttttgccaagggctttctctggccaccacaccccactgagcccatgcaggacaagcggagtacctgagagatcatgcccctggcagctgcccttaaccaaccactgacaggaggtgatggaggaagacgccggtttccttgccccttggtggaaatagcctggaggcatgtttacactggctcccagagttccccagtggaatcgagccccagttgcccagaccagtaacttgctcaaaaatgtcccctgtgtgtgtcttctcatctgtgtctcatgtccccactcccttactcccttacttcctaagactaccacccaaacaaatcacttgaatccttgcctcggtgtctgcttctgggggcacccagcctaagaccaacacagtctaagaggcagacacagatatttgcagatcaggatgaatgtggctgccccctctagcaactcacaatcagatggaaagcccaacaccactcagtcacacagacgcagaattgcaaatggggagaaggctgagactgtgaagcaacagagaaccttgttgttaaaaccctccaatgggctgagcatgacggctcacgcctgtaatcccagcactttgggaggccagggtgggcggatcacctgaggtcaggagtttgagaccagcctggccaacatggtgaaaccccatctctacttaaaatacaaaaattagccgggtgtggtggtgcacacctgtagtcccagctactcaggaggctgaggtaggagaatcgcttgaacctgggaggcagaggttgcagtgagctgagatcgtgccactatactccagcctgggtgacagagcaagactccatctcaaacaaacaaacaaataaataaaacccttcaggcagggcatggtgacttatgcctgtaatcccagcactttgggagacctgaggtcaggagttcgggacctgcctggccaacatggtgaaaccctgtctctactaaaaatacaaaaattagccaggcgtggtgacatgtgcctgtaatcccagctactcaggaggctgaggcaggagaatcacttgaacctgggaggcagaggtttcagtgagtcgagatcgtgccactgcactccagcctgggcaacagagtgagactctgtctcaaaaaataaataaataaataaataaataaataaataaaaataaatttttaaaaactctccataggccaccctcccctcccaggccaaaattcaggtcctctaggtcctgaaccatctgccaccccttccctttcctgtgctcacctctccccatcctgctccagccataatgggctgctggctgtttctcagttgtgctgtacgtgttcctgcttcaggacctttgcacttgctattccctctcctcagatgcttttccctagatctccccatggccggctcctccttctagttcaaatcttggttcacatgtcacctcctcatggggtcacctcagcacccatcccccaccacctcccaccagtcactttctaaccatgtcaccctggtatattgacttcatagcccatatcacagccggaagttatattgcttacttatgtgttgaatgatccccaaagatgggctctgtgaatatgagcagaggctgtgtccccggtgcctggaacaaaacctggaacagagtaggagccctatggctgtttgctggagaagtcattcaatgtttaagtgatgagagggaaaatgaatgaatgaatcatagaaagacatttaacagggggacccaaccttgtctggaaaatcagggaaggcttccctgaggaggtgacatggagctgagatatgaatggagatggggtattaactgagccaaagggacaggaagagctactcaggcagagggaagagcacatggaaatgtccagaggatcccagaggacacaccaggactgtgcaggggacaagccagctgtagccgaaggttttccttaatatttttgaacctattatgtgtccagctcacggatacatggagaacaaagcaggcaagttgctgtgcccctggagctcccaatctggtggggaggacagacactcaccaaagagtgggccaacatttagtcccaaagtttcagttgcccttgcacagcctcctcttacagtacactgttgatgcttgctttccagaatacgccactgagatgctgtgtagaaacacacttggcatgaacacacacacacatacacatacacaataagtgaagaattccctggatttcccaccaaaagagatcagaaaagacattcagagtagctcctttttgttgttaataatttaattaatcaccctctaccaatgtgatcaccattagcacagagctataatttcctgagttcaagaaagaagggagcagctatgccaattgtatgacaatgtgtcctcccatagaaaatttaaccgccaccaccccgccgccaccactagtctgacaacagccaaagccaggcccagtcacctagtgggttctatatgaagtgctgggatggagccaggttttatctctcggcctcccagttccgggctcgtgttttgtccctcccagcagtcagaaaaaggctccagctggacgctcaagcctcccctcccctcccctgcagggccacagtagaattggtcccactccatttgcatttcctaccgggctcctaaagccttttgagtttttgaccccaggatgtcatggcaggagggtcacagttagatacctgtcagggaattcttcatttgtgtgtgtgtgtgtgtgtgtgtgtgtgtgtgtgtgtgctgagacagcgtttctccatgttggccaggctggtctcgaactcctgacctcaggtgatccacccgcctcggcctcccaaagtgctggggttactagatgtgagccaccacaccccaccaaaagttataaatttatgcaaataaatatatacaatttttatttgtccagttaaaaaatatatgcaagtttttgtcaattaaaaaaatttcatgaggggagggggttgggcgatcagggaaagatgtctagacaggctcctagaggtgagagaaactccatgttagagggaaacatagggctatgggaactcctaacaagaccccttaacccagcctgggaaatcacagaatccttcctggaggaggaggccttttcactcattcttaaagggtaaagtcagctagagcagggtcaaaaaccttttctgtaaagggctagatagtaaatatttatgcttcatgagttcctgtcacaactatgattacagatctaaagcagccatagataaaactgaaatagatgtggctgtgttccaataaaactttattgacaaaaaccacacgctgagccagatttggcccccaggccatagtttactgacctctgagctaaacaatggaaaaggagaaagcaagcaaaggaagtcacttgagcaaaagctggaggtgtaaaagagcagagaattaggaaagagccacgttgtggttttccttctccctgaggcacagaaggagttgtctatgtttacacaaagacttgggctctgacgcaagctgagtgcaggattccaaattcaccccatcgacaagtatttattgagtgcctactaggtgccaggcactgttctaggcactgcaatgacacagcaatgaacaagagactttctcctgtggaagacaaacactaagcacacacaagtgaacaagcgagccaaaaaaaatacagcttcctcacctgctgtgtgaccttgaagatgttccttaacctctctgtgccccaggaggataatatgatcagagtgcaggcccagcacacagtggctgttctataaatatagctgctgttattattgtaagtcaatatgcaaataaatacacattaaaaaaaaaaaaaaaaggccaggcatggtggctcatgcctgtaatcccagctactcaggaggctgagatgggaggccgaggccagaggaccacttgagcctgggaggcagaggttgcagtgagcaagactgcaccactgcaacagagaaagaccctgtctcaaaaaacaaaaacaaaaccgtgacacaggtagtacccaggaaccgggcaggtgcatgagatgagggtggggggtcgactttggatcaggtagtccgggagggcctctgaggaagtggcagtcaaagacgccctggatcgcattctgtgagccaatatcctagaattagagtttgcagccccatgccctgcagactcgcaagagcagttaattaaaaatacctgcctctctggagcacaggaaggtgtcttctctaattagtgtgtgagtgtaaagtgctttgaaatccaaggataaaaggggagtgaggggtgaggctctggtcacagggccagggtgtcccactgggaagcgatccatgaacccgaagagctagactcagagagccatgctcgtgctcacgggcctgccggagccgaccctctctcaggttccaagtggagtttagggcagcgggagatgcgcccacctagggcaggctgagaggagcagagcacggatgttggagccagactccgaggtcatgtgcttaaagccgtggacccagcacgtggcagctagcggtgccaagttggtattagctgtttcccgtcttgttacatgatcgcttttgtgttcttgtttttgctgttgttgttacctgccatttactagccgggtgaccctgggtaagttactgaccctctctgaaccatgattttcttctctgagcctcagtgttctcttctttaaagtgggacacttgcagcccagcagtgccgggtgcaggcaacacgtgtggcacagagcagaacaaacaccactctgcccagtcagccattgccttgtgccaagcactgcctcaagcatattgtatgcgttcactcatttaatcctcacagacattattcccacttcctggacaaggacctcagagccaccaggaatagccatgcactgcccagctccagggggccccaatcacacagaccatgacatgaacagcagccctgaggctgtaaaacacagacaggttaagtttttcacccaaggccacacagctagtacttggcagaactgggattagatcccagactgcctggctccggagctgggctcctgaccctgggtcagcgctggtccttgtcaaggagactaaagtaacagagggtttctgagatgtagagaaattggttctccctttgcccaggcaagcaggcagcaagtctcaatctgccgatctctcgtttctctctagcctaagaacctgtatgtttctggggattttttgatgttttgttgttgttgcctcctaattttataagagcaagtcttgtatgttttggtttgtagggcatactgccatcctgggaggcttctgaatatgccacgacatcaggcctcagattggcgctgaggaagcgctaataatcacgtccccgtaatcccatgctcaaggccttcacttgacaggctcagagaggcaaagtgacccgcccaaggtcacacagctaggaagtggcagagctgaaataggacttctagactccagcttctttcttaattcccacatctgatgtctcaaactggtggcccatgggccaaatgcagcctgtagaatgtttgatttggcctgcgtgacgtttttgtaaaattagaatttatcatcagtatgtaaagaaacggatatttccaggaatagtattcaaaatatttaaccagactggcctgggcatcgaccattcagagtggctgctggtgggatagcagaagccaatggctactgcaaaaagacgccataaaaaatatcagatctggaaaatgcaaaaccatggagacaataaaaagataggtggcttccgggagtgagagggaggaagagatgtctaggtagggcatagaggactttctagggcagtgatatgatgacaatggtggattcctgtcattacacatttgtccaaacccataggatgtacaacaccaagagtgagccctaaagcaaattatggaccttgagtgacaatgatgcatccatgtagttcatcaattgtatcaaatgtaccaccctggtgggcaatgttgataatagtggaggctgtgcctgtgtcgggggagggggtaggtaaaacatctctgtacctttctctccattttgctgtgagcctaaagtttcttttaaaaataaaggcatttggccgggcgcagtggctcacgcctgtaatcccagcactttgggaggccgaggcgggcggatcacgaggtcaggagattgagatcatcctggctaacacagtgaaaccccatctccactaaaaatacaaaaaattagccgggcgtggtggcagccagctgtagtcccagctactcgggaggctgaggcaggagaatggtgtgaacccaggaggcggagcttgcagtgagctgagattgcaccactgcactccagcctgggctacagagcgagagactctgtctcaaaaaaataaataaataaataaataataaaggcatcctaagtcacaggatgagataagaggtcagcacaaagtacaggtcataaagaccttgctgataaaacagactgcagtaaaggagctggccaaacccaccaaaaccaaaatggccacgagagtgacctctggtcatcttcactgctacactcccattagcaccatgacagtttactaatgccatggcaatgtcaggaagttaccctatatggtctaaaatgggaaggcatgaataatctaccccttgtttagcatatgatcaagaaataaccataaaaatgagcaaccaggccgggcgcagtggctcatgcctgtaatcccagcactttgggaggccaaggcaggcagatcacctgaggtcgggtgttcaagaccagcctgaccaacatgaagaaaccctgtctctactataaatacaaaattagctgggcgtggtggcatatgcctgtaatcccagttactggggaggctgaggcagaagaatcgcttgaacccgggaggtggaggttgtggtgagccaagatctcgccactgtactccagccttgggcaataagagcaaaactctatcaccaaaaaaaaaaaaaaggcaatcagcagccctcggggctgctctgtctatggagtagccattcttttattcctttattttcttaataaacttgctcttacttcacacacaaaaaaataataaataaaacttacttttggccgggtgtagtgctcacacctgtaaccccggcactttgggaggccacgacaggtggatcacttgaggtcgggagttcaaaaccagcctggccaacatggtctctactaaaaatacaaaaattagccgtgcttggtggtgcgcacctgtaatgacagctactagcaggggctgaggcaagagaattgcttgaacctgggaggtggaggttgcagtgagctgagatggcgccactgcactccatcctgggcaacagagcgagactccatctaaaaaaaaataaaataaagtatatgttttaaaaattcagaaggtttggctacatggctcccacatttttacaggaccatgatggctgcagtgagttccaggtgcctccatagataaagcgtgtgtgcccgagcctgtcggtcccctgagactgcctccctctgtagcatcagccagccagtccccgcaggcacctgagcaatgactcaggcatgaaggggattctttggaagttcctggtgagaaagagaaccgggtgaaagtgtggcctgcaggagtggccaatgaggagcaaagaggagggtgacacccgcctgtgtcagctcctgctcatcatctccccagtgggagcctcctgtgcactttccacaggaccgagtgagccactcttgattcacccttcctctgcccaggcctgcagtgggcgggtgcccaccgtggtacacagcccatgaagcagccaccctctgccactgaggcttggcagtctgaatggatgccagcctatgagattagaaggaaaatgggcaggatgtgaaaaatcagaagctgcctgactactcctgggaaattgttcctgagaccatgcccttcctgcgtctacttgtagcatcgctctttcactgacaagcatgtatcgagtactaggcaagtccaaaggaggtcttgaagtagatacagcaggacaggcaagaggctggttccatggccagctgctgtttgtacctgaccaatgttcctcccccatgttccggtaacagcacccttccaccactatcactccatgtgcctccccaaccagaggaggtggatgaatgaggcctgggaagtcagcatattccatccccccggccccagggattggtctgagatgggtatgtgacccaagtctggccaatcacagtcaacccctagacatgtgctgaggctacacagaaagtcagcttctgctcacttggcttgtcgatctggcagaatggaagctgggggatactggggactatttttgccaccacataaggtgaccctaactgacacggaggaaaacagaaccaagaagtggaaacagcatgattcctaaacaacagatgcacacctggatccagccattcctgaagctgaaggtcttttcatttaaatgaaccaaaacattcacagaaacacacactattttttttcttaagtcactttgagttgggtttgtttctgtcactttcaaccaaaagaccctgactatacaagtggatgtatagctgtttccaggctggaaaacaaacagctatggcaaaagcagaccatgagacatccatgtaaaatctgggagttgagggctgggtgcagtggctcacacctgtaatcccagcactttgggagtctgaggcaggtggatcggttgaggtcaggagttcaaggccagcctgggcaacatggcaaaaccctgtctctactaaaaacacagaaatttgctgggcgtggtggcatgcacctgtaatcccagctactggggaggctgaggcacaagaatggagaattgcctccctctgaactttttatttggtgctataaataaaccctttcaggtctgagcggcagtcaggtggatttccagttacttgcagctgaatgcatttctacctgtcactcctcctcaggaccataggttgctctggattcccaccacacacgtggagatactgaggtctggaatgcagagaaaacttccccagtgtcacgtggtggagtcatgagtttactgactcactacccagtgctctttccgctcaagacaacctcgtggtccgttcctttcattcgggctgctgtatgcatggccaacagctgctttgtaaattaaacacttcccatggaggcagtgatgatgatgaccttgcccctgaatctttccagcctcttacgtaaatcgcccctgggtcactgtctccatgcctttggacccaggacagcttccccacatcctttaaaacgatgagataaccacatgtaaacccagtgctcctggaaaggtgtgagtcatgcatcacggaacagaaggttcacagccaggagtccgcctatcatgcttgtcatccagccttccaggcttgcgtggagcttgttcactgcaaagctgattcatctgcagcttgtggtcagctctgacactcagatcattttctgctcatcttgtgcctggctagtgacctttaattaggtgctgtcaacttcctgtcttcctgtctctgtccatgttgtctttccccctattttaaaaggactgtatgaatactaaagacatgatgatgatgatagcagttagcacttactatattctaaatgctctatataaatttaaaagttgtttctcaaaagccattgtctgagataactagtattactattgcagttttatggattggaaaacaagggcttagaaaagtgaagtcactttccttgggtaacagagccaggagtatttggtggagctggaatatgaacatgagtgtgttggaccctggagtgcagctcgaaaacacaaagccagttgagtctgttaagctagcttcagaggctccactacagcagtttagactctaattacatttactgtttgtttaaaagacttctggacagactggagacctcatggtgtatttgtcatcttaaggttgtcataaaggacccacagtctttgcactttccctctcctccgtcaacagcaagtcagcaacttgtcctcagtctggtcttcacatcacagatggctgccacagctcacgcatcacctcttcacacaacaatgtccaaagcaggcagagaaggaaaggggcaaataggtttctctttatgtgcctctttcttgtcatagagtaaactctttcccagaagcccccagattagtttccctttggacaaaactgggtcacgtgaccacctctgagccaatcgcaggtccaggagaacagggtggctatgactgggtaaagcaaatgcagtttttcccctaggactaggcacatggccagctgcagaaagtcagggttttctcagcaggaaaggagaggggaatggcagttgacaaggcaacccgcagtgtctgataccccagcatttaaaaatgtttagcacagacacccacgttgatttgcaatatgattgtaggtggtacatgaagttgtggttgcgtgtttttaaataattttagtatttattaagtatttaaatgcatttgaaaaaaacatataggccaggtgtggtggctcacacctgtaattctagcactttgggagaccaagactggcggatcacttgaggtcaggagttcgagaccagcccggccaacatgatgaaaacccatctctactaaaaatacaaaaattagccaggcgtggtggtggtgtctgtagttccagctactcaggaggttgaggcaggagaatcacttgaacctgtgaggtgggggtggaatgagtccagatcgtgctactgcactccagcctgggtgacaaagcgagactctgtctcaggaaaaaaaaagaaccaaaaccatatatatggctatctcatcaatcagaaccacaacaactataaaacaactatatttaaggttttttgcaaaaaaaaaagttaaagaaaatattaagtaaataatagatcatttgcttcaagatttggcaaatgtaaggataggaaacgctgttctatgttatcctgcttggccttttttccaacttctcagaggcgttctgccttcaaactccctcttgaggaaaataaacacccacaaagatttttgcatcatctgcaaatatgattcaaataaagccttgagctcaaatataatccaggcttcctcagctgggaaggacaggcatctcgagtccaagcctttcctggtatttcacctctgtcttcatggttttatggggttttattgggtctgtccctcctctggaaagccaccacaaatccgatttctgagagaacaagatataaataataaacagaatgactccttgagatttcttgtccttgtgaggaattttcaaacgttcctaagacatgaaatcttttcgtttaaacaagagtttgggagtccgtcatgagaactggataaataatggcccagtgacacagggacatatgtcagagcctttgttcaaagaaataaagtagctcaatatgtgccgatagcaaaaggcgcctgggatctatcgtgatgcgagaacagcaaggtacagaacaatatgtgcgaggtacagaaccatatctgcagactttttctgtaaagggctgcatagaaaatcctttgggcattgcaagccgtactgtctctgttgcagctgctcagctctgccatcgtggcatgaaagcaatcatagatagcgcacaaagcagctgggctgtgtatcaataaaactttatctatggacacagatgtacattgcatataatttttgtgtgtcataaagcattcttctttcttttttttttttttttgagacagagtctcactgtgtatcacaggctggagtgcagtggcgtgatcttggctcactgcaacctccgcctcctgggttcaagtaattctcgtgcttcagcctcccgagtagctgggactataggcatgcagccaccacacccagctaatttttgcatttttagtagagacagggtttcgccatgttggccgggctggtctcaaactcctgacctcaagtgatttgcctgcctcggcctcctaaagcgctgggattacaggtgtgagccactacacctggcctcaattttgttttgttttgagacggggtctcactctgtcacccaggccagagtgcagctgtaccatcacagctcactgcagcctcaacctccctgggctcaggtgatcctcctgcctcagcctcctgtgtagctgggactataggcatgtgccaccacccccagccaatttttgtattttttgtagagatggagtctccttatgttgcccaggctgggctcaaactgctaggctcaagtgatctgcccgcctcagccttccaaagtgttgagactataggcatgagacaccgtgcctggcctttctttcaaattttaaaaatcatttaaaaatgtaaaaaccagccgggcatggtggctcatgcctgtaatcccagcactttgggaggctgaggtgggtggatctcctgagttcaggagtttgagaccagcctgaccaacatggtgaaaccccgtctctactaaatacaaaaaattagctgggtgttggggtgcatgcctgtaatcccagctacttgtgaggctgaggcaggagaatcacttgaacccaggaaggggaggttgcagtgagcccagattgcgccattgtactccagccttggtaacaggagtgaaattctgtgtcaaaaaaaaaaagtaaaaaccattcgtagcttgcaggccatacagaatagtgagacagatttggcttgaggacgataatttgccaatccatctataaacctctgatgcataacaaaattgtagagaaacaccagaagtatagagaggcatgctacacgtgcgtgtgtgcacgtgcgtgtgtgtgtgtgtgtgtgtgtctgtgtgtgtacagctggctctccatacccatgggttccacccatccgtagattcaaccagtcatggatcaaaaacattcaaagacgctgggcgtggtggctgtaatcccagcactttgggaggccgatgctggtggatcatgaggtcaggggttcaagaccagcctgggcaacatggtgaaaccccgtctctactaaaaatacacggtggcatgtgcctgtaatttcagctacttgggaggctgaggcaggagaattgcttgaaccgggacccgggaggcagaggttgcagtgagccgagctccagcctgggctacagagcgagactctgtctaaaaaaaaaaaaaaaaaaatcaaagaggccgggcacagtggctcatgcccgtaatcccagcactttgggagaccaaagtggtggatcacctgaggttaggagttcgagaccagcttggccaacatggtgaaaccccatctctaccaaaaatataaaaaattagtcagtgtggtggcacacgcctgtaatcccagctattcaggaggctcaggcaggagaatcacttgaacctgggaggcagaggttgcagtgagccgagagcttgccactgcactccagcctgggtgaccgagtaagactgtctcaaaaaaaaaaaaaaaaatatatatatatatatattcaaagaagaaatgtgtctgtactaagcatgtacagactttttcttgtcattattcactaaacaatacattaaaaccactatttacattggatttacattgcattacatattataaataatctagagatgatttgaagtgtacagggggatgtgcctaagttatatacaaatgttactttattttacataagggactcaagcatctaaagattgtgatatctgtggaaggtcctagaatcaatccccaaggataccagggacaactggagagagaagcggggagagagagacagatatttgtttatatctctaaaaggacacactaacaactggcaacaagaggtgcttctgaagaggggaactgggaaatgtcagaggaaatgagaaggaagatattttgcacgacatggccttttacactgcttgagtttttctccacatgcttgtgttacttttacaaagcagaaaacatttgccaaaggattactatgccacagacaataaaaatgagacgctataaacaaatatacacagtcatgcatcacataatgacattggtcaatgatggaccacatatacgaccgtggtcctgtaagactgtaaggcggtatttgtactgtatgctctctacgtttaggtatgtttagagacagatacttcccattgtgttaccattgcctacagcaggggtccccaaccctccaaggtaccagtccgtggcctattaggaactgggctgcacggcaggaggtgagtgacaggtgagtgagcaaagcttcatctgtattgacagccacttcccatcactcgcattaccacctgagctccacctcctgtcagactggtggtgccattagattctcataggagctcgaaccctattgtgaactgcccatgtgagggatcttgattgtgtgcttcttatgagaatctaacgcctgatgatctgtcgctgtctcccatcaccctcagatgggatcgtctagttgcaggaaaacaagcttagggctctcactgattctacgtgaaggtgagttgtataattatttcgttatatattacactgtaataattgtagaaataaagcacacaataaatgtaatgcacctgaatcgtcccggaaccatccccctcacactggtttttggaaaaaaatttcttccacgaaaccggtccctggtgccaaaaaggttggggaccgctggcctacagttttcagtacagtcacgtgctgtacaggtttgcagcccgggagccacaggctccaccgtgtagcctgggtgtgtagtaggctatgccatctaggcttgtgtgagtacactccgatgttctcgtcatgacgaaatcacctaacaacacacttctcaaaacatagccctgtcattaagggacgcgtgacttcacaggcaatcacagcacaacttcagcgggtgccgttcattgggccatttgtagaatggagccattggagttgtgagggcacaccccatgtggcagccctgttggtaacaaaactaacaccaagagtttctatgaagtgaaatttgtgagtaaatattaaagaagtagggtcggagtggaagttgtgggaggggaataaaatctcactctttccgttttatgctattccttatcaggaccacaataaagccaatcttctgccaatatttacttttgatttttttctccagagtggaagaaaaatgcccaggcctggcaggaataggagagtaggattgaaagttgaaacaagagcaggaagctcacccggaaataaaatcatttccagaacctcacaatgaaaatgacacttatttcacagaaacactcaaaggctgactccacttacgagactcctctcttgtaaccccagtcagctttcccagatatcttgggattccatgaaacccactgcaagcattttgacccaggttggaggcctcaaacagcagtctcccacctaagaacatggaagatgtggatttttggtcagcagtggtttcaaaatcaagacatttcatgtaaatgcaggagtttctggcttcccttgaaactcttggctctctggccgccctgagcccacattcccacgtggaaacttcaggctgccgtcaaacggtagttgctccttccagatggggcaagggctccccgtttgccacagtccccaccactccctgtcgccctccatcaggaccacttcactcaattctttttttcatttgtacttcattcactcaaccaagatttattgagcacttactatgtgccagaaagctgcaaacaaaactgacacaaattcctccttcatgcaacttatattctggctggtgaggcaatgaagaaaaagaaggaaaagcataaattccagagggtggtaagttctgctgacagtgaaaatagtgctgcaaaggtggagaaggcatgctgggtgtggtcaaggaaggccttaggaggaaggtacatttgagcaaagatctgaagctggtaaggacagcaagccttcaggatatctgtggaaagaacagtccagccagcaagaacagcaagtgcaaaggtcctggggcaggactgctccttgtgtgtctgtgaagcagcaagaaggccagtgcagctggagaagagtgagtgaggggaagggggtggaaatgaggtcagagaggggatgaggtatcaatcttgcagggcctcataggatctttggcttttactctaagtgaggtgggagccgtggaggattctgagcagaggcaatgtggttgtatgggtgatagactccctctagctacatgtggagactggactgtgtgtgcgaagcgggtggggtgggatggaggagaaaggtggaagctaagaggccagcaaggacccactgcagtggtccgggtgcagggtggcagtggcaggacagggcggtggctatggaggtggtgacaagaggttggagtctggacatactgtgtttcccggctctttttttttttttttttttttgagacagagtttcgatcttgttgcccaggctggagtgcaatggcacgatctcggctcaccaaaacctccctctcccaggttcaagtgattctcctgcctcagcctcctgagtagctgggattacaggcatgcgccaccatgcctggctaatttttgtagttttagtagagatggagtttctccatgttggtcaggctggtctcgaacccctgacctcaagtgatcctcccgccttgacctcccaaagtgctgggattacaggcatgagccaccgtgcctggccttcttcttcttttttttcttttttgagacggagtcttactgtgatgcccaggctggagtgcaatggtgcaatcttggctcactgcaaactccccttcccaagttcaagcgatttttctgcctcagcctcccaagaagctgggactacaggtgtgcaccaccatacctggctaatttttgtatttttaatagaggcggggtttcaccatattggccaggctgatctcaaactcctgacctcaggtgatcctctggccttggcctcccaaagtgctgggattacaggcctgagccaacatgcctggcctgtttcccaactccttttggcacttaggagaaactcccctcactcactctcctccagccacattgtgcttgcatgatccaacctcagggcctttgcacttgctgttccctctgccctgcacacgccgcccccagatattcccaaggcttcctccctcccttctcagggctaaagctgctgaaacagcccacattcctgacattctcctcccttgctctgctgggttggtcactacagtgaacttcctggcctcaatatacaggagacgttttttcttgttgttgagttgtctatctcctgccgtagggcatcagcttgaggagggaaccagtgatgtctcttttttttttttaaacagagtctcactctgttgcccaggctggagtgaagtggcacaatcttggctcactgcaacctccacctcctgggttcaagtgctttagcctcctgagtaactgggattacaggtgtaagccaccacacctggcaattttttttttttttagtagacatggggtttcaccatgttggcccggctggtctcgaactcctggcctcaagcgatctgcccacctaaccctcccaaagtgctgagattacaggcatgagccaccgcgcctggccagcaatgatttctctcgttcactgctgtatccccgagtctaactatgcctggagcagagtagtccatcagtgggacttgtagaaagaatgagagaaggcgtcagagattgattttgtttctgccactcattagtgtatgacctgtgcaaatggctcctccctccatccccagtatcctcttctataaaatgggtctctctacataacctctgtagggctgttgtgagaatctgggaagcctacggcaaaaagcctttagcaccattcagggatcttcgaagctgtccgtgttaggtgttgctatgaaccttaggagggaatgagaggatagctggaagagagtcacccccgcagaggccaagaaggaagagagaaacacgtttgtcctaagatgggacaaggctgttttttccagtattttcagtaagaaaacgaaagagcatccaagaatctcagggcacagtccaggctgcaagcttcttggctgtctggcctctgcccatctttcctgctctctgctccagcctatagctcccttccccgcagccctgtgagcccctcagtggccccaggatcctctgctcctctgctcctctgggaatccagtcccctccggctgaatgcctcaccttcccctggggtctaccactcagccctctgcagccagcccagctcctgtgtggaattccctggtggctggtatgagggggtgcccagcatcccctcctcatcctgtgacagtggataagggccagctgttagcatcattgttgttattactattacacaaacgcttccaatggatccacaccacctaagcagcgccaggaagccagggaaatgccagaagcaataacagtcagcaactatgtagtacctactgtgtactgtgctgtattgcacataggcaccgttccaagcccttcgtgctattaactcatttgattgtcacagtgtatgaggcaggtactatgttaactccattttacagataatgaaacagatctagagtggttaagtaactaaccactgagaaagctagattcaaatttgtgggttggctctaaaacctgttgttttaattaactctacacactgctgccttatggcattttattgtttgaaataataacatttcctgagcactcactatgtgccagctactaggctcagaattacctttcttcaccctgaaagaccctatgagttcatttgattattaaatagtcccattttacagaagaagaaactgaggcatagaaagatagtgcctcacacagtgtggcaaattgtgttttctgtttttttttttttttttttcttgctctgttgcccaggctggagtccagtggcaagatcatagctcactgcagcctcctgggctcaagccatcttcctgcctcggcctcccaaaatgctggaattacagggagtgcacccagctgcgcatcgtgttgtcttaagatgcttacagcatcatctctcatcctcatgatctgtttctgcttctttttttttgtaaaaaaaaacccccccagctttattgagatataattcacataccataaaactcacccttttaaagtacacaatccagtgggttttggtgtattcacagagttgtgcaatcatcaccactacctaattttagaacacttgcattgcccccgaaaggaacctcacacccattagcagtcactcccccttcccaccatgttgtgaggaaacccaaaccagcccaagtgaagagaccacacgaagaagtcacacacaggtgtctttctgatggcccagctgcggtagcagctgccagacacgcaagtgaagactctccgaccgaggccagcaccccagccaccaagtcgccctcagccttcaggctgtcccagccgaggccccagacactgtggagcagagacaagctgtcctgctgtgccctgtctgcattcctgaccacaggatctgagagatatcattccaggcgagtagaatggctgctttacaccgctgtgttctggggtgggtttgttatgcaggaggagtaaccgagccacagctggtaaggggcaatgctcgggtttgaacccgagtccttctggctttgaggctgccccttaaaccacatataggctggatgatcccctggatgtggaggagtcggcactccctttcttgtgcaatcgactcagtgcatcggggtgacgtgccctttctctagctgaccttctggaagcacataaacggagacagaaatgctttctttttgttttgccagtttattgctgctgctgctgctgcagttcttatttagtatatatgaattcttgttcttattttttgctagttagagtaaggctgggcgtggtgaccctcagctgtaatcccagcaccttgggaggccaaggtgggcagatcatttgaatcccagagtttgaaaccagcctgagcatcgtggtgaaaccccatctctacaaaacaaatacaaaaattagccgggcacggtggcatgtgcctgtagtcctagctacttgggaggctgaggtgagaggatggcttgagtctgggaggcggaggttgcagtgagccaagattgcggcattacactccagtctggccgacagagtgagagcctatctctcaaagaaagaaagagaaagaaagaaagaaagaaagaaaaagaaagaaggaaggaaggaaggaaggaaggaaggaaggaaggaaggaaaggaaggaaggaaggaaggaaggaaggaaggaaggaaggaaggaagaaaggttagaataaatagataagaaacacaaaaaatccacctgccatccccactacgcaggaaaaacctccacataacacttgaatcttgtagaattgtatctaccaggcatttaactcacgcaatttcactgggcatcagtgggccaaaaagggtgatggggagagtgacaatctttattttttcgtttcttttctttttctttttttttttttttgagagagtcttgctctgttggccaggctgcagtgcagtggtgcaatcttggtttactgaaacctctgcctcccgagtttgagtgattctcctgcctcagcctccagagtagctgggattacaagtgagcaccatcacgcctggctaatttttgtatttttagtagagatggggtttcaccatgttggccaggcagatctcaaactcctggcctcaagttacctgcccgcctcagcctcccaaagtgctgggatttacaggcgtgagccaccaagcccggctgagaatgacaattttcatatggcaagtgagtgtagctggcaggtcctattttttgttcaacatggccccaaacacaagatgacccctctccatccaggggctatttggatttgctaagtgtttataatgcaccacggttgagaggaaatttaacatatttttcaggatcatttttgattctgcataaaaagagaccttttttatcccttccaaaaatgggattgagctatgcagatggttttgtacctgactttttcacgtaacaacgtactttgaactgcttttgggcaagtggctttctcctggccttcatgggaaggaagcgctctgggagtccacctgcgctcttgctgagtggcagtcaaagtcgactggaactctacaagctgtgcagtcaggatgctgagcaaaagaagccagatgggaagagcacacactgtgtgcttccctttatagaaagttcaaaaccagcaaaagtcatctatggggttagaattcaggacagccattaaccttgggggtggtggtggggaggatttaccaggagagacatcaagggggcttctggaatgtcctgtgtacatctgggtgctcattccacgaatgtgtccacttggcgagaattcactgagctctttatgtataatgtgtgtacttttccttgcaattaaaacacacatacaaacacacgcagatgcatgcgtgcgcgcgcgcgcgcgcacacacacacacacacacacacacacacacacacacacacacacagtgttcttagagcgcaggctgtcctgtctggaaatacatgtttaatgcttttgccacatatgggcagaggtgagtgttgagaggactgggtatgaagttgggaacccaagtctgaatcctggttcagccatcattaaatgtgtgaccttgggcaagttacttaacctctctgagcctcagtttcctcatctggactctgtaccaagcccacaagatcacagaagcagccactgctcgcctctccatctggctcttccgttcttctctggctgtctctctaagcccacaccacactggccaccattcttgttcctatcacagcaaagctcaatgtggcctcagggcttttgccctagctattcctgctgcctggaattaccctttccctgattttcttgtggttggttccttttcctccttcatgtctcagttcaaaggttaccttctcagagaggagagcccctcactgaccactatccacaccagccatcatcagttccattccctggcctcagtttcttcccagtgcctcttaggttctgaaatggtcatatttgtttcttgcattgttgttgctctttacttgttatctgcttggcactccctctagacccatggactctaggacatgaggaatcatgattgtcttgttcattgctacacctccatcacataaaacaatgtgtatttgttcaattaaccaatcaatctatacagcgatctgattctactttatggaattctcgggaagtttcgaaagtacgttttaaacagccaggtttataagaatgaggaaactttgaaagctctgtttgaatgtggttaactctactgagaagaatctagataggcccaagatgcttcgtgagctgcgtcttccataatttcatctacactgaaagtcactataccgcttgcaaccacccgccccccacctccaccttttgctatttgcaccttttgttattggccatttggctggaacaaagtcactaatattcttagtagtttatttctatatatagagattttctttttttttttttttgagacggagtcttactctgttacctaggctggagtgcagtggcatgatctcggctcactgcaatctctgtctcccaggttcaagagattctcctacctcagcttccttagtagctgggattataggcatacaccaccgagccctgctaatgtttgtatttttagtagagatggggtttcaccatgttggttaggctggtctcaaactcctgacctcaggtaatctgcccaccttggcctcccaaagtgttgggattacaggtgtgagcccccacgcctggccaacatggttttaagatggtcaaaaggtacagagtgtacaaagagaagtctgtctccctctgactactgctctagagccgattagtgtttccaggtacctagtaagcgcttccagaactgttctgtgcagaaacaggcatgtgggctatatcttcatctttcccgtttacacagaaaggatctagttcaatacactgctttatatctttgctttttcttttttcttctttataattgatcttggagctgtttccataccacacattgtatgtgtatgttttagttgcacagaaaggtgtacgcatcaagagctcagagagtaactggtctctctctctccttctctctctctctcttcttttaagacgaagatttgctcttgtcacccagggtggagtgcagtggcctgatctcggctcattgcaacctctgcctcccaggttcaagtgattctcctacctcagcctcttgagtagctggcattacaggcgtgcaccaccacgcccagctaatttttgtacttttagtagaggcagggtttcaccatgttggccaggctggtctcaaactcctgacctcaggtgatctgtccacctctgcctcccaaaatgctgggattacaggtgtgagccaccgtgtctggccatttttttttttttttttgagacagggttttgctctgttacccaggctggagtgcagtggcatgatcttagatcactgcagcctctaagtcccgggttcaagaaatcctcccacttcagcctccctactagctgcgactacagtcattctttttaaaaaccatagaatactgacggacacctcaggcagctctggtcttttgcttctgcaggcagtgctgcagtgatggtccttggatgcacctttgggcccaggaaaatcactgattccttttgaatctggtaaagcaacccgagagtttacccctccccaacctcatcttcacccctcggcccatcccgcccttgctggtgtttgtgttttggccttttaaagactttttcaaaattgactttggcttcttggcctgaactctgaagtgtttgagctgataagatagcaggcttggctgtgggggccaggggtaaacagtgaccccggggccctcagccccagtaagggaggggccacagccccaagtctctcctgtctccagctgtgggagcaggcggtgtggctggaggaggaagctgaattgcgttgggctccagatgggtttgggaaccggaaggaagtgggaagctggccccacacagacccacttctctgggcctttgagaacagtgccaagaggcgcaacatgggctcagtatttgccggggcctctcctaaaccaaacaggacgccacgggcaagttggagcaaagtcctggcaaacctgaagacacatcccgtggagccccaaggagccgagggtcacaggaggggccctgcctccaaggccgtggcagacagaactggcaccatctccacacagcgtcaccgagtgatgtccagtcgtctcaggccggggattgtaactgccccgctctgatctaggccacagaagtgaacaaatcagtttggattcccaccctctagaactttcttcagttgaggagggaagagagaggataaataggcaaaaactggccagggtgcaggggactacaatggagaatggccaggctgtgggggcagagcaggggcactgctcaccctggagggggaaggcctccccagtcatgcctcgtcccagcttaaaatgctttggggcctgccatggtttctcagggctcctgggaccatggcctctgcgtgatcttccctgcccacctctaccagcagggtcagtggtgccagcttggcaacacttggtgcccatgtctacctggggtccctgcatggctgctccctctgctggcagcgccctcacctcccacctcccactcagctctcagctctcagctgagatgtcaccttctcgtccaggaagccttccttgatgtccctggatggtcttggggctatcacatgctcctgtacattcctcatccctgcttcagtcactctggggttacttgtttgcgggtggcccaaggtagcccagcatggccagaacccagccctgtggatgaccctgctggattcaaatgctagctccgcctcttagctgtgcaaccttgggcctcagttttgccatctggaaaaagggcatagtgatggcatctacctcacagggtggttgtgaggaagaagcagtttaatacaagtacttagaaagacatctggcaccaactttgcactcagtaaatgttggctgtgccattacacttgttctctctcccacagaacacagcaggtgctcacttcacatttgcatgctaaatcagtgcagcccttcaaatatgctcatgaaaatgagcaatgggggggaaggcttagttaattcagatgctcctcgacttgggatggggctgcagcctgataaacccactgcaagttgaaaatatcattaagtcaaaagtgcatttagtgcacccaacctacggaacatcatcatagcttcgcctcgcctcccttaaaggtgctcgaaacgtttacactcacctacgttgggcaaaatcatctaacacaaagcctattttataataaagtgttgagtatttcatgtaaaattattgtactctgtattgctaaactgataaaagattaaagttcaaaattccaagtatgatttctatcaaatgcctatctctttcgtaccataataaacacgaaaagtcctaaaatgaaccattgttagtcgaggatcatctgcaacggaaaaatttttttaaaacacaacagtaaagagtgatttacaactatgtaacacacacacacacacacacacacacacacacacacacacacacacagtccaataccctggcttggggaaaagaaagaaacagaccgtttagtgtggttttgttagaaggatgggacaaaaaaataatttttcttctttcttgtttgatgtgtttttttctactcttctttaataagcatggtttcaatttaaatgggaaaaaaaataacaaagaatctagagaaggaacccgcaagccctttctgttccatagagttttcccacaaactggggcagggggtggggtaggtggggtgtggcggggtggacagagaaagagctgccctttagaagttaagcaagagcaggaaaaccatcgtgtgccgggcgggggtagggtgtcagcttgaccaggggaagttgtggcaactaataacaaagcaactcctctcccaactctgggcatggcaagacatgcccccactccccagaccccaagatggagctagcaaccctgcctaatgccacggccctgtgtttccctgcagcgtaacacgtgtcgcacggcagcgtctgtaaagaaagggccttgtccgggcgcggtggctcacgcctgtaatcccagcactttgggaggccgagacagacggatcatgaggtcaggagaatgagaccatcctggctaacacggtgaaaccccgtctctactaaaaatacaaaaaaattagccgggcatgatggcgggcgcctgtagtcccagctactcaggaggctgagggagaatggcgtgaacccaggaggcggagcttgcagtgagccgagatcgtggcactgcactccagcctgggcgacagagcgagactctgcctcaaaaaaaaaaaaaaaagggcctcaccacctgccccctactcgcgtatgttacctcgcctcacctgcctaaccctgaagacctgcctgcaagcagtaaggtactactgttagccccatttcacagacggggaaactgaggctcaaaaggtgtaataatttgcccaaggttgcccagttgatcaatgacagagtctgaacttaataccatttgggctggatgtggtggctcaggcctataatcccaaagttttgggaggccaagtcgtgaggattgcttgagtccaggagttcaagaccaacttgggcaacatagtgatagctcatctctacaaaaattaaaaaattagctgggcatggtggcatgcacctatactcccagctactcaagaggctaaagcaggaggatctcttgagccctggaggttgaagctgctgtgagtcatgatggtgccactgcactccagtctgggtgacagtgagatacacacacacacacacacacacgcagattttaacaccatttggttttatccttgtctgtgatgtctgtgatttgtcatctttttttccatttccactaaagtagatgttaacaaatggaaggctggaagaatggatggatgaatgggtgggtggatgataaatgggtggatggatggatggaaggaaggatggatggatggatggatggatggatgaatgggtgagtggatgataaatgggtggatggatggatggaaggatggatggatggatggatgggtgagagatggataatgagtggagggatggatgaatggatggatgggtgggtggatggaaggatggatggatgggtgagagatggatgatggatggagggatggatgaatggatggatgggtggatgaatggatgggtcggtggatggatggaaggatgaacagatggatggaaggatggatggatggatggaaggaaggatggatggatggatggatgagagatagatgatggctggagagatggatgaacagatagatgggtggatggatgaatggatggatggttgggtgggtgaaggatggatgatggatggagggatgaatgaacagatgggcaaattaatgaattagtggatgactgggtgggtggaatgcatgcataaaataaatgggtgactgaatacaaaaagaactaactaaataaataatgatgaaaggcagagggcactaagagggtttcacctttcagggtttgttcctggacattgaatgtgccctttggaaagattgcaaactggcagttatcagggtaaattgggctgcagacatattttgtttgatcttcacagggtttttaattttttgaattgtcattattttaaaattaggaaatttcacattaaaaatctagatttctgatttctcctgcaaaattgggccggcacccataccaggaaataatataccaggactgacggggctgagcctctgagtgctcacggtccccactgctccacaatgcagtcctgctattggggttgtgtccactgccatttatcatggcagtttgggctggtgtttttctcagtaccattacaaggaaaatgaaaaatctcttacaggtggctcttggtcaaaagtggaaaatgaacttaggtaaagaggaaattgggagagaagtatttctttgtggccatggagaacactcctgtggattcgatggaccagcaatgcatcttgcctgagtggttaggggcacagatgctagagcctgatggcctgggttcaacccccggctgtgctacataccggctgtgtggcctcgtgcaagtcactgaacgtttctggcctcagtttcctcatgtgtaaagcagaggtggtgtcagtccccacctcatagagtgtcaatgattttctctccgtggggctctctaggtgtgagctgctattatcttacacagggctggctcccgtcatgtgtgtgatctgcctaccctgagcgtccacagcagcggttctcaaccaaggtcaactgtgccccccaggggacatttggcaatgtctagagacatctggggttgtcacaacttgggtggggaggggctaccaacatcttatgggtagaggccagggagactgtgaacagcctgcaaggctcaggacagatcagcaaaagattctgctgccccgtgtactccgccccgtgtactacgtgctgaggctgaggaacccggatctacaggagtccaagtccccagaggggctgagctatggccagatatctaggagtccctgaaggctgccagaggtgattccctctagacgtggcaggagccattccctctggcctgagccacctcagccctcaggatcatcaggccccaagtagtgccccgtcccagggtgcctggccccagcctgctcccagccccatacaacaggcaagaaatgtgtctgtccctagcgcctcctggtggcccagccctaaactacatgactcttcccagcccagggtggtgggaggggaggatgaggacgtaccttccgggtgtttaatccagactagttgggaatgtgggaatttaaggtcatggaaggcggtagccaatgtttcaaagacaaattgacataggtttgaatctcagatcttccactgaccatctgggaggccttggacacatcccatgactctcctgggcctcagtttcctcatctggaatggggatgatgttatttatgtcacagtttcgttgggaggattaaattaagtgcataaacagatgaaacatacgagatgcttaggattaaattaagtgcataaacagatgaaacatacgagatgcttaggattaaattaagtgcataaacagatgaaacatacgagatgcttcacaagcctcctctcggatacttgttattgctgtgttcatagcaattcatagccacttgtgtttgatgaatttccagtgtactcagagtgatttttttcactgactatcaacaaataattttgctgcaaagaaatacagatatgggaaaggatgcacaatatattatcaaatgaccacaggcctcagaaacattgtatacaaacactctatctgtgtgtgtgtgtgtgtgtgtgtgtgtgtgtgtgtgtgtgtgtgtgtgcgcgcgcgcgcgcagagagagagagagaatcttggttgttaaccagcctggagtgaacacgactcactgcagcctccacctcctaagctcaagcaatcctcccacctcaaccttccaagtagttgggactacaggcacctgccatcatatttagtagagacagggttttaccatgttgcccagactggtttcaaactcctggactcaagtgatcctccaaccttggcctcctaaagtacttggattacaggtgtgagccactgcacccggcctgatatatctatattttaaaaatatgtactttcataacatgtatgagaaacaaatacctcattttcttagtatataaaaatccctagcagatcaacaaaaagacaattatccaagagaaaaatagactaacaatttgaatgctttgccaccagaaaagaaatataaacagtctttgaacgtattttttaaatgtccaatctaacatataaacaatgaatatgtagattagaactatggtgaacacctttttcccctatcggcaaggccaagatcaagaagtccaatcatacttggccttggctaggacgtggggaaaccagagctcacggaggttgccggtgcaaatgacgattggtaggtacaaccttagagagcatttagacaaccagcgtcaaaatgtttaaacgcacctgccctatgactgggcgattcagttgctaagaatgtatccatcagaaatagctctgaatacatggaaagacttctgtgaaagggatactaattgcagcattgtttgttgcagaaaaaccctggaaatacctccgtgactatcaccagaaaacttgttagataaattattatattcagacaatggaatgtgcaaagaatgctctcctagtgctgatctggaaagatctgccaaggtacattgctaagttgaaaaaaacaaaatcccagtgcagaacagggtgtgtggtgtgcttctatttagagaaatgagtacaggaatccacgcacatatttgcttatctgtgttctggatgtctctgtaatgatccccaagaaatgataaccagaatggattctggggagggaagcttggagttttaaagctggggatgggggttaaggattagagggagaagacccactgtaaatcttttggtatcttttgaatttttgcatatgaatacaatcccttgttagtttttaaaaatggaactttttaatgcattgatagatgacagagagaaaaatgccttgaaggatatgctccaacgtgtcaatagcacttatctctgggtggctgatgtgaattagaagcgacttttattttgttctttttttattatttctctaatcaattatttattttgagacaagatcttgctctatcacccaggctggagtgcagtgatgcgatcaccactcattgaaacctctgcctcctgggcttaagtgatcctcccagcttagcctcctgagtggctgggactataggcacttgccaccatgcctggctgattttttatttttaattaaatttttttttgtaaagacgaagtctcactaagttgcccaagctggttttgaactcctgggctcaaacgatccctctgtttcagcttcccaaagtgctaggattacaggtgtgagccactgtgcccggtctgttctttttaaaaaatacagagacagggtctcactttgtcacctaggctagagtacagtggcataatcatagcaccctgcagccttgatcttctaggctcaagtgatcctccagcttcagcctcccaagtagctgggaccacaggcatgcaccaccacttctggctatattttgttctttttacttagattttctaatttaaaaaaataattaccagccgggtgtggtggcccatgcctgtaaatcctagcactctaggaggccgaggcaggaggatcatttgagcccaggagtttgagaccagcctgggcaacatagtgaaaccgcgtctttactaaaaatacaaaaaaaaaaaaaaattagctgggtgtggtggtgctcacctgtagtcccagctactcagaaggctgaggcaggagaatcacttgaacctgggaggcagaggttacagtgagcccagatcacaccactgcactccagcctgggcaacagagcgagactccgtcttaaaataaaataaaataaaataaaataaataattatcaaggtatattcagataatttttttaaaaattaagtaagtaaacacctcagtgttctcttggtagtcaggggaaaactaacttctacatgaaaaaaagaaaagaccaaaaacacatacacttctctaaacaggcagattattttcattgccaaggacattacagagactgaggagtgggttggaaatatattctatgaaaaatcgagaattaatacaactgtcctaccatgcactttctgggcatcaaaacgccaagcttctaactcagacctgagttcaaactctgactgccacttactagctgggcaagttgctcctacgccgttggcctcagtttcctcatctgtagtctgagaccacattgctgctggcaggctcgagtgagatcatgcctgtgaagtacttggctcaggcgtactcagagacccagttcaaacagggaacaggcagaaattctgcaccccgcaagggtgacagggcggagggaggacaggaggggccgctttgccggactggggatcagtgtgcaactagctgggcccggagtcccccacaaaccggccagctcagaggttcttccgacagtttggagagagtgacaccaagtggccaagtctgaaactacaccttcaagccggagggttagagcctctccccgacccctccagctgcggtcctgagccaggcactgaacttccctgaatctgagttttttcagctgcgaaatggaggtaatcctgcctacctggcagagcggaggtgggaattaaatgaggtaacccgcagagattctctccaggaccgccatgttgcacaacttcaggggccccattcatgaaactgtgcaacatagcggcacccctaacaggtggctgtcattatcatccctccctcagacactgagtttccttctctactcccctagagcgattctgaagctgggtcttccaaagtatagaacaaataccagtgggattcgtggggagatcttggtgggcacagcaccccagtatcaaataacatttcattctctgtcaatcattctgatggcatctaggcggcagtctcagtttgataggaacatgacattaacgcctttctaacacttacctgcctcccttccgaactttctgtttgagagtgggcctcagacttagtgccttcagaaggcaaaattatttggctagaatttaataaagttacatgttttcataatatttactttttgtggtcaccttctattgagagcaagtggtgctggttttccctttacagtagatgtggtagattgtattattgtcaaagtatttatcccattggcaattccctggtgaccctcccggctgaagtcaggcttggctgtgtgacttcctttgggcaacagagtgtgagctaagctttcgagaagcggctttgtcatgtggtttatctctgctgtgagaatggcctgccccaggaatgggctgcacctttaacctggatcagagtaaagatgacatacggcccagagctgcagtgacccacaaccaacaagtaatgagaaaataactgaggattcatattctcaatatgaataagaaatcgacctttgtcattaacaagctcctgagatgctggggctgtttgttattgcagtaaaacatagctcgagttggctgatgcagtagagttattaagtttcctttaaaaataaatatactgggccgggtgcagtggctcacgcttgtaatcccagcactttgggaggctgaggtgggtggatcacgaggtcaggagttcaagaccatcttggccaatatggtgaaaccctgtctctactaaaaatacaaaaattagctgggtgtgatggcacgcgcttgtactcccagctactcaggaggctgagacaggagaatcgcttgaacccaggaggcggaggctgtagtgagccgagattgtgccactgcactccagcctgggtgacagagcaagactctgtctcaaaaaataataaataaataaataaactggcctggtgcagtggctcacgcctgtaatcctagcactttgggaggccgaggcgggtagattacttgaggtcaggagtttgagaccagtctggccaacatggtgaaacccatctctactaaaaaaaaaaaaaaattagccaggcatgatggtgcacgcttgtagtcccagctactagggaggatgaggtgggaggatagcttgaactcaggaggcggaggttgcagtgatgagttgagattgtgccactgcactccagcctgggcaacagagcgagcctctgtctaaaataataataaataaataaataaatatactggcctgatgcagtggctctcgcctgcaatcccagcactttgggaggccaaggcggatggattacccgaggtcaggagtttgagaccagcctggacaacatgtcatagcccctgcatactcctgccctccttatcctgtttggtttttgctgctgttattgttgttgtttgttttttgtttggttggttttttgagacagagtctcgctctgtagcccaggctggagtgcagtggcacgatctcagctcacggcaagttccacctcctgggttcaagcaattcctctgcctcagcctccagagtagctgcgattacaggagtctgccaccatgcccagctaattttttgtatttttagtagacatgggattgtaccatgttggtcaggctggtcttgaattcctgacctcaagtcatccccccgcctcagcctcccaaagtgctgggattacaggcatgagccatcacacccagcctttgctgttgttttgttttgttttttgctccgtatcacctatcatcttttgaccatatttcacatttatgtgtttattttctgtatccctgtccccattagaacgtcaactccctccttaaaggcaaggattttgtgggttttgttttgttttgttttgttttccactttatagcccagtgcctagaacactgcctggcacataataggtgctcagtaagtatttgctgaatgaaggaatgagtacatgatggcaaaaggtagacaacaacggctccaggcccatgctgcacgagcttcaagtccagctgaaacacttctctttcagctgggcgcggtagctcatgcctataatcccagcactttgggaggctgaggctggcagatcacttgaggtcaggagttcaaaaccagcctgatcaacatggtgaaaccctgtctctactaaaaatacaaaaaaattagccaggcatggtggcaggtgcctgcaatcccagctacttgggaggctgtggcacaagaatagcttgagcctgggaggcagaggttgcagtgagccgagatcgctccactgcagtccagcctgggcaacagagcaagactccgcctcaaaagcaaaaaacaaaaaaacttctctttcccagtgttctggaaaaagtacagaattgaatccttggagtggagcacactgattgtccaggcctgggtcggatgcctgtatttaaatccagaagtaggctcagccccatctaaaccatgtgagctgacactgagccaggagtcttctctacaaaaactgtgatgctgttacaggggcagaggaaatgggagccaggtaggtaaaaacaatcgtcacccaccacaagaaggaggcttattcacccagctgagtgcctaggacttagtatgggtcccacgaataagtttgttcactttccttgtttccttatttggaatcaagttgtattcaggtggtggcgggggcagggatagtctgttaataccgaagataggactagaataaggggcaggcgattcaggccctccctggacaccaacatatctatggaattaaaatactgctgaaaaaaagtagatgcttagagccaaaagaaatcttggtttttctacatgtaacttcttacataatcagcaaaatattaattaacctctcttctgacactgacaaagacacccttgagaagaaatttaaaaagaaacgttgttggcttgaatctattgctgttgattagtttgtgaccccacatgtgcttattgcattatacaaccataaggcatatcacaaaccccaagaccagccaagtgggcctcctgaaattggcagtcatggtcagctaaaattctgaaaccatatggcatagtgctgttattgggaatgagtaatctattttgttccagaatctaaattctaagctctgtaataatgcctccagttgtagagtctgagagttgtccccagtatcagtttttcccttctatagaggtaaatgctccgtggaaacacatggctggttgcagtaaagactacatttcccagcctcccttgcagcaagaagcggccatgtgactgaggtatggccaatgagatgtgagcagaacatgggacagcaaacaaggtgatcagccatttggacctctggatggggtccacatgctggtgagaatgggacaacaagttaggggcccaagcctctgacaactttctggtacagagccaccgcccagctcagacatccctgtgaaaaacaaataaacgcttatcatatttcagtctcttattttatgtctctgggccccacagacgaaattatgttctaataatacacctctaaagaagttggcctggcatacataaataaagctcttcctccttcttcttttcttctttttcttcctcctcctcctcctcctcttccttctttcttcttctccttctcttccttcttctccttctcctcctccttctccttctccttctccttcttctcctccttctcctcctcctcttcctcctccttcttctcttcttcttgattcttcttcttttggtttgttggtttttttgaaacagagtcttgcttgacacccaggcctgagtccattggtgtgatcatagctcactgcagccttgaactccttggctcaagtgatccaccttggcctcttgagtagctgagactataggtgtgcaccaccatgcctggctaattttctttgtaaaattttctttagagatgtagtctcactgtgtttcccaggctggtctcaaactcctggactcaagtgatcctccctccttggcttcccaaagtgcctgggattacagatatgatccaccgcacttggccttcttttttttttttctttaacggaagtatacaagtttgattcacttatatcagtttattcctgttcaacaaatacttaagaccatctaaagatgcctgccaaggaggcccctatgttatagcggcattaaaaaaaataacaaaaactgggccaggcacgatggctcacatctgtaatctcagcactttgggaagccaaggtgggaggattgcttgagcccaggagttcaagaccagcctggacaatataacgagacctcatctctattaaaaacaaataaataaatgaaacctactctttggcacctttaacttaagtcctccagggagctggtttccaaagctggctgactatcagcagcatatggggagtctttttaaaatagattcctggaccttggccagttcatttgaaaagcaggatattggaaatctgtaattttaaaaacactccccttcctaccagctgtgtgactttgagcaagtcatttaatttccgagtgctgccattgcctcatcagtgaaatggggacaataatcgtacctaccacataggtctgttgtgggcatgaatttatttcatatgtgcaaagcactgagcatagtgcctggaacagagcaagatctctgtgtgtgagttatcattatgtctgttggtgggagtatagattaatgcaaactggcccggtgcaatggctcacacctgtaatcccagcactttaggaggccaaggtgggaggataacttcagcccaggagttcgagaccagcctgggcaacatagctagacctcgtctttacaaaaaattaaaaaaaaaaaaaaaatagccagatgtggtggtgcatgtgtgtggtcccagctacttgggagcctgaagtgggaggatcacttgagtctaggaggtcaaggctaaagtgagctgtgattgtgccactgcactccagcctgggtgacagggtgaaaccctgtctcaaacaacgtaaaacaaacaaaaaaaatgatgcaaactttctggaggacagtttgtgctatctaccaaagtattaaatatgtacccagcaacatggtagctcatccagggcacaagaatgatcattacagcttacatttattcaacaagtatttattgagcacctactacagtactttagtcagaataaaataggctatactgcagggacaaagccagcgttgcagtgacttaatacagcaaaggttcatttcttgcttttgcattatgatacaaattgagtacttttctccatctggaacaggctgatgcaggtgaatcccaaaatcagggctcagcctgggagggttcttggcttcactcaggaaagaattcaagagtgagccaacagtgaaagaaagcaagtttattagagcagcagtgtgcagcagaggggctgctccgtagacagagcagggctactccataggcagagcagcccagaacagcagcaaagaccacagcccagagcagtagtccttgcagaccagggctaccgatatttatacccactcttaattatatgctaatgaaggggcgggttattcagaattttctagaaaagtggcagagggttcccagaactatataaggtaacttccaggtcattgccatggcatttgcagactgtcctggtgctggtgggagtgtctttatgctatgagcagtgagggcaactagaggtcacttttgtcaccatctgcttgtttcagcgagtttctttactgcatcctgttttgatcagcagggctgtgatttgtgcttggaaaataagtcctactgatctcctacctcaccttctttatctggaaaaggaagtcttagagatgaacactgtaggcaaagagagagctagaaggtaacatggaatttttcaacggccagacctgaaagtagcttccatcacttttgcatatcccattgggcataaatgagccatgtactttcaaccttactgcaaggaaggctgggaaaggtagaggagcatgtagatattgagtgaggggtgtctttgtgacatctactatgttcaaagacagtgctaggagctggggcagtcatgggggagcaagaccaacaaggttcctgccctcataggtcctcccttctaatgagggagatagacaataaacctctgctctaaacatgatcccagatatatgtcattttgcacttgagcaagaatatctgatggatacattttcagaatctgtggctgctgcgtcaaagggtatatatatttgtcatttcaacagatatggtcaaattgtcctccataggactgtgccaatttccacctccaccatcaaggtacaaaagtgcttttttttgcctgcaggcttgccaacacagtgtgttatcagacttttggatttttgccaatctgataggcgagaaatgatctctgtgtacttttaatttgcatttttcttattataaaggaagttgaacatcctttcacatgtttatgagctatttgtatttccttttctgtgtacttgtgtgtacatatccctcatccattttcctctgagtcattgattgaggatattactaaatgaaaaagtgaagggacagaacagaatgcatagtagaatcatttttgtaaatgaaaagtgaaacaatatgttggcatatacatataaatatactcgcataggcataaaaattttctagaagcagccaggcgcggtggctcacgcctgtaatcccagcactttgggaggccaaggtgggtggatcacttgaagccaggagttcaagaccagcctggccaacatggtgaaaccctgttcctactaaaaatacaaaattagctgggcatggtggtgcgcacctgtaatcccagctactcaggaggctgagtcaggagaatcacttgagcccaggaggcggaggttgcagtgagctgagattgcgccattgcactccagcctgggtaacaagagcaaaactccacctcaaaaaaaaaaaaaaaagaaggtgtaaacaactacagatgtccaccatgaacacctcctgtgtgcaaggcactgtggaagctgctgggaatacaatggtgaacaagatgtgtgtggtccctgccctcaaggagctaacatcttagagggtgagagaagaagggcaaattaacaaatgttttaggtcaggcgcggtagctcacacctgtaatccgagcactttgggaggcctaggtgggtggattgcttgagcccaggagttcgagaatagcctggcaaaatggcaaaaccccatctctacaaaaaatacaaaaattggccaggcatggtgatgcatgcctatagtcccaggtactggggaggctgaggtgggagaatcacttgagcccaagaagttgaggctgcagtgagccatgatcatgccactgcactccagcctgggcatcagagcgagatcctgtctcaaaagaaaagaaaagaccaacaaatcagtgggaaaatggtcaaaaaaagatcaaaaagaggaaaaagcaaatggctcttaagcataccaaaagatgctcagttttggccaggcacagtggctcacgccagcactttgggaggccgaggagggcggatcacccgaggttgggagttcaagaccagcctgaccaacatagagaagccctgtctctactaaaaatacaaaattagccaggtgtagtggtgcatgcttgtaatcccagctacttgggaggctgaggcaggagagtcgcttgaacccgggaggcggaggttccagtgagccaaggtcacaccattgcactcctgcctgggcaacaagagtgaaactccgactaaaaaaaaaaaagctcaattgcatgtataaaaagagaaatgagataccatttcctaccaccaccccgcccccaccattgcactggtttaaccaaagtctcaaattgacaatccactgtgttggtaagggtgtcagaaaatgagcacacgcaaactgatgcgactccacatgaagaggactttggcattattcattaagtttaaaatgaccatagctgttaccaaggcaattctgcttttaggagttcatcctacagatttattcacacacagcatggacgcataacattttaagggaatggggaggaacagaatatatattcacatttgcttgtacatgcataaaccatcttagaaagatatgcaatggactaataactgattgtgggaaggaacagcatatgcaaaaggccccaagctgaaaaagaggttggtgtatttcaggaactaagagtgtgcctgggaaggatgacatgtgacaagtggtggcctgaggctgctgagccttgtagatcaccacttaggagtctggtcttgagtccaaatgcagtgggaagacattcaaaagaagatgatctgatttccattttaaaagcatcttgctgccatttggagaaactactggaggaaggcaagacgcaagtcaggagactgattagcaggctggacagttccctgagggagggacagggagcgggtggctgcacctgagaggtggcagtggtgaaaacgagcaggcagattgaagacagtttgaaattgcaatggatgagttggatgtggcccaggaggggtaacagagcagactcaaggaagactcaaggctgaattctggcttacgtggccacatgggtggctatggaggctactgggctgggaaggctagagaaaggggcccagatttcgcttgggtaccccagggtggggtgtgttaaggttgagaagtcaataaacatctgagtggcaacttccccctctctctccacttccccaaccccgcctagggtcatggtgagggtggggagtgggaaaagggcagggcataaaaataaaaaataaaacgccaggcacgatggctcacacctgtaatcccagcactttgggaggctgaggtgggcagatcacttgaggccaggagtttgagaccagcctgggcaatgtgatgaaactgtctctagtaaaaatacaaaaattagctgggcgtagtggtgtatgcctgtaatcccagctactagggaggctgaggcagaagaattgcttgaacccgggagacagaggctgcagtgagccgagatcgtgccactgcactccagcctgggcaacagagcaagactctgtctcaaaaataaaataaataaaataaaataaaataaaataaaataaataaaataaaaatgttcatagcagctttattcataataactcaaaactggaagtggcccaagtgttcaacagcagaatggataaatgtttactatccacagcagaatggataaatggataaatgtttactatatatatatatgtatgtgtatatatgtatgtatacatacaaatatattacaaatatacaaatatattatttaatctataatctgggaagtctactaaaatagtctaaatatattattagtatacattattttagtgtgcatatgtatatatatacacacatatattaaaagaatgaaaatgaacaaactactgatacagcccacacaaatgaatctcacagacattctgttgcgcaacagaagccagacaccaaggagtacatattgtctaatgccatttattcattttatttatttatttattgagatgaagtcttgttctgttgcccaggctggagtgcagtggcgcgatgtcggctcactgcaacctctgcctcccaggttcaagcaattctcctgcctcagcctcccaagtagctggggctacaggcacgtgccaccacgcccagctaattttttgtatttttagtagagacagggtttcactgtgttggccaggatggtctcgatctcctgacctcgtgatccgcccacctcagcttcccaaagtgctgggattacaggcgtgagccaccgtgctcggctgtctaatgccatttatatggacttgtagaatcagcaaatctaactcgtgatgaaagtaaaaactgagaaaccaagtttcctggaagcacaaaaggcaaggcaagatctattttgaagcaagctcagagtggcagcagattatgtaggggccacaaggcagcctttaagctgcacctcaaaaatagcatctgtcccctggatattttaagagtgtcctctgcagggcatggcaggagccagaggcctgtttgggcatctccaagcgtgcacctaaagaatgtatcatctggccgggcacggtggctcatgcctataatcccagcactttgggaggccaaggcgggtggatcacctgaggccgggagttcaagacaagcctggccaacatggtgaaaccccgtctctactaaaaatacaaaaattagccaggcaaggtggtgcatgcctgtaatcccggctgctggggaggctgaggcagtagaatcacttgaacccaggaagtgaagtttgcagtgagctaaaaaaaaaaaaaaaaaaaaaggaatgtatcaccccgcctccccttgaccctgagcaccacccggctccaaagctgtgtcagcagcaatataaaaggtgcagagataaagagagacatttaattagaagatgatttgggaatcatcttctaatttaggaaccaagctgcaaaatatctttctcccttaatggcacaaatggggaatttggactttgaaccttttctcttgtcaggccaccaaaaacgtcttcctgtattaatagaaggcaaatgtaaggattcagggccaggagggctgtgggctgtgggtcttagattgtctagagtcagaacattaagaacatgagagccctttctggacctctttgtttatgcggggcttctgctggggcttataatcacctcatcactgctgctatttttgcagtaattattaagtactttaatacgtgcacagggcatgtgcagtccttcaattacactgctcctgcctcattgtcgggaggcgagttggaattgttctccttgttttgcacaaaagaaagcaaaggcctgggtgaatgaacaagttcagggtcaaaaatgagtcagcacaagggagatggcaggaggtgggtgggaacccggcagtccctagttcccgcccagcttgaagtgctagcaggtctaaattcaaggcatgtgccacatccttgaagaagtgatcgacggccgggcgtggtggctcacgcctgtaatcctagcactttaggaggccgaggcaggaggattgcttgagcctagaagttcgaaatcagcctgggcaacatagtgagaccctctctaaaaaaaataaaaataggccacggatggtggctcacacctgtaatcccagcactttgggaggccgaggcaggcagatcacttgaggtcaggagttcaagactagcctggccaacatggcaaaatcccatctctactaaaaatacaaaaattagctgggtgtgctggcgcatgcctgtaatcccagatactcgggaggctgaggcaggagaattgcttgaacccgggaggcagagattgcagtgagctaagattgtgccactgcactccagcctgggccacagaacaagactctgtctgaaaaaaagaaaaaaaaatcacctggttcatagtaagatgtcattgttaattttggaaggtgtgctaatagcatggtggtttcagaaaaaaaaaaaaaaagaacaacttagtatcaactactggtgaagtgacaaaaggcttacgatgaaattgacaaaatgaatgtggataattgctgaaggtggatactggagagttagttatatgactctatttttctagatgatgtttgaaattttccatagtacatgttttgaaattgtatagactaaatgttgcaaacttgtatcttatgggtaaaatgctgctcacaaaaatcctgtacctcctttagatgggtccttggctctcagtgtgccacagtccccacccttccctattatagcctgacactgttcatcatcactcttgggtcactgtttttgtttaagtagaattaaaaggaaactgaatgagttctcttggggcaagactgttatttgccatccatatgtccaacctctacttctttcttacttatagaaactcctacactattggcaatgaattttgaaataacatttcccagtttctcttgaagctaagaattgcccagtgtttctcagtcagaggtgattttgtcccccagaggacatctggcaaagtcttggaagacagttttggttaccacaacaggggcagggagggaggcagggagtgctctactgatatctggtgggtgggtagaggtcagggtactgctagacagccctccaatccccaggtctccctcccacaacaaagaattatgcagtccaaaatgtcagtagtgcccgattgaatggccaatgcatgataagtggaagttgatgttggggtttccaagaaagccctttggtgtcttgccaatcttcctagaatataaacatgatggctggagtttgagcagccattctgtgaccttgaggagggaggttctatgctaaagatggaaggaaatgggatccccgaaaacatcatagaattgccatatctgttctttggaatgcagattttcagacatggttttatgtgaaagaaataaatctctaatatgtttaagtcactgaaatcaagtctctgttactgtcagccaagtgcagtttctaaatgatttgtctctgtgcccagttctctatgctaatggagaaaggaaagatagactaagagggccatatgtttaaagaaaaaaaaaaaaaaaaggcctgggacatgctggctcttgcctataatcccagcacttcgggaggccgaggcgggcagatcacctgaggctgggagtttgagaccagcctgaccaacatggagaaaccccgtctctactaaaaatgcaaaattagctgggcatggtggcgcatgcctgtaatcccagctactcgggaggctgacgcaggagaatcgcttgaaccaggacccgggaggcagaggttgcagtgagctgagatcgcgccattgcactccagcctgggtgacaagagtgaaactccgtctcaaaaaagaaaagaaaaagaaacgagaaaatacgtttcttcacaacaatgaaacagttcattgccttcatttatgtcacttcttgatccctgtaggcatttgagtttgcaactcctggactggtccttaaccaaaaagatgaggaaactgaggtcctcagcaggttaatgatgagttaggagtgaatccacaacctggtccctctccccgcatttctaaggtaccaaggcctacgcactggcgaagaatatggtttctgcagccagacagacgttggttcaaacactggtactgacacaggaaaagttcccttatcctcctcgaagggcatgcgatgggggtgtggctcacttcctcagtgcttcgctgctcaaaacccctagggggagcaggcagacgggcagggtgtgggactctggccacgcagcgtctaggcgtgaatgtttacagctcctgaggccccagtgggcgtgtgttccagggtgctcttttcgtttaaccgtccatagacagcttgtgttagctcaattagaccccttgccttatctcaaggacagagggctatctgtatcctggggtttcttgccttggcgtacctgaagaactggatcacacgtaggcttggagaatgaacgcaaggttttattgagtggaggtagctctcagcagatgggggagccaaaggggatggagtgggaaggcgattttcccctggacctgggccgctgagtggcccaggctctcctcccaccaccccagccaaactccaagttgttccaccggtcgatggcctgctggcatctgccggtgcctgatggtgtgctctcatgccagttccttcttctccaggtctagttgcttgtgtcttttttttttttttttttttttgagatttagtctcactctgttactcaagctggagtgcagtggcatgatctgggctcactgcaacctctgcctcctgggttcaagtgattctagtgcctcagctgggactacaggcacctgccaccacgcccgcctaatttttttgtatctttttttttttttttttttttttttttttttagtaaagatggggtttcaccatgttggccaggctggtctcaaactcctgacctcaagtgatctgcccaccttggcctcccaaagtgctgggattacaggcgtgagccaccgcacctggccgtcgcttgtgtcttcttccaccagtgcgttcttcttggcatccagccacttgtgtctctgcctgctagggtctgggggtttctataggcataggatgggggcgtggcaagccagggtggtcttgggaaatgcaacattcgtgcaggaaaacagaaatgcctgtcctcacgtaggtccgtgggcacaggcccaggggtgaagccctacccagggaccacgcccttcccttcccagcacttccctgcccccactcccgtatcagtaccaccaattactagctctgtggctttatgcagctcacttagcttctctgtctctcagtttctgatgcgtaaaacaaggatgacaataaaggcacctattgcctagggccattaggtggattcacatcagtccgtgccctggcaggaggagagttttatgaatggactgtctataaaatgtaggtggggaccgtccatttctccaacagctgggaaggatgttggtgttgaagtttacacacctatcaaggacagtaactaccatggcttctggtgctttgacaaaacctccaatgcatagccttctggttaagcgtctgtgatttcatattattggagcattcatggtatccctggtggttgcagctttctacaagattgctatggccgaaccaagaaagaaggcatacgcagatttctacagaaattatgattccataaaagattttgagatgaggaaggctggtatctttcagagtacaaagtgatcttggaatatgaagaatttctttgagttgaaatatctagaagtttgtcactgacttgtgttcctgaactatgaaacatgaatgaatatgtcagctaagaaatagtttctcttggtcaggcgtggtggctcatgcctgttatcccagcactttgggaagctgaggcgggcagatcgcttgagatcaggagttcgagaccagtctggccaacatggtgaaaccccatctctactaaaaatacaaaattagctgggcatggtgggcatgcctgtaatcccagcttcttgggaggccgaggcagaagaattgcttgaacctgggaggtggaggttgcagtgagctgagatcgcagcaccgccctgcagcctgggcaacagagccagactgtctgaaaaaaaaaaaaaaaaaggaaaagaaaaaagaaagaaagaaagaaagagtttcttgactaggtgtggtggctcattcctgtaatcctagcattttgggaggccaaggtgggcagatcacgaggtcaggagttcgagaccagccaggccaacatggtgaaaccccatctctactaaaaatacgagaaataattagccaggtgtggtggcgtgcgcctgtaatcccagctactcaggaggctgaggcaggagaatcacttgaacctgggaggcggaggttgcagtgagccgagattgtgccatcattgcactccagcctgggcaatggagcaagactgtttcaaaaaaaaaaaaaagaaagaaaaaaaagaaaaaagaaatagtttctcttgataaataaacaattaacaacaacaataacaaaatgtaggtgggatttacagaacccagggatgctgcatcactccagcgatagtaacaaagggagtttatcacagctagatagtaacagaggggtccttagcacccccacatagtaacagtggcctggaggagcaaaggaagaagtggtctccaggtccagagagagggagctctacagagaggctacctgacagaagctgtgtcatccttcagtcaagggacacagtagaccatggtgacccaacaggagagctgggggaataaacagctcctctggaattgagatgttcagttagccaagtgcatttgttagctgcccaaccactctaagctcacgaggagcaagagaaagcatgccttcttagtagctactaaacaaatcctgagatgaactctgattgaaccaatctgtgccacatacccatctctaagccaatcatcgtagtttttttgtttgtttgtttgtttgagacggagtctcgctctgtcacccaggctgcagtgcagtggtgcaatcttggctcactgcaacctccacctcccaggttcaagcaattttcctgcctcagcctcccaagtagctgggattacaggctcccgccaccatacccggctaattttagtatttttagtagagacggggtttcaccatgttgtccaggctggtctcgaactcctgacctcaggtcatccccccgcctcagcctcccaaagcactggattacaggcgtgagccactgtacctagccaatcatcatagttattgtacctccactgctctggttcgttggtgctaagtcacatgctccttgttgggttacaggctcaagggaacttcctgatggagcgaacttccagaaggggtggttcccaaatggaaactcaggttacttggcatggaagagagtgccgtagattcagggtggccccaaatcagcaaacattcattatattcacgttataaaatgaaagaacattcagaaaacagcataaagtagcatgataccattggtaggcactgtgggatttcccatcagccatcctcaaaacttatttttggcaaatgaaagtgttggactagggtaactcttccctgccaacattcaacatgtgtgactatccccagaaagtaactacgtaggaacaagaacatgagatgctcccagctggagccccaagggccatttccaaagctaccaacagagcgtcctctgtgtttcagtaagggtaactttctgcaaaatacaacaaagatgttcatgtgaaataaagggggtgatttatgtatgaaaaggtggggtgtgagccttgtgaataccatgggaagatgaggtccttccactcagggaataggagccccgtggtttggccccagatggtaaacaggagtgctgtttagttgaagaacagcatgtcccattctgttcttttggggagatttaaagcaagaccgtttgcaattggatctaattgataagtgtcttagtttggaatcccctgttggcacacctcatatcttagtttagattctctagatacagaccctgagacaaagactcaaggacacatcacttctttggaaggcaaaagaaatacgagtagagaagaaaagagacccagggaaaggaggacaaccaatattaagcaagttatcaagacagttactgccctaggcaagtgaagcttaattccacctgtgtagaacacatgtctcagagttatcttacctgaaggatcagcaactccatcttggaagctaatccgccatgttggcttctgattaacccctgttccaagaaggcctctaagatttctagtttatctattattccttgtgtaagagcaggttctgactctatatcctgtccttaggtcaaacaaccttgatgttatcttacttcaactgttctacacatcccttctgaaccacccctctcctatggtatagaagccctgggtctgggagataatggagtggggatccaccatcttgtctggccaccgcaggagacacagacgtggcatctgtttctaagtttctattaaaagtttctttctaaggaactgagtatgtcagcatcatctcttcagcctctcagcttccttggactttggggtaagtttgcatagacctgcccactgcaaaacaatcaggaagctggggtatttatacaccacctctatccattccttggttgaaggcagctggaaagaagagaaggaatattcattctccaacctcctttaggctgcttgactctgacaaccagaagaaaaaacccaaaaaactcatagaaaaagatgcacatactaccagttagaagttgggcagttggccaggcgcagtggctcatgcctgtaatcccagcactttgggaggctgaggagggcggatcacctgaagtcaggagttcaagaccagcctagtcaacatggtgaaacaaaatacaaaaattagccgggcgtgacggtgggtgcctgtaatcccaggtacttgggaggctgaggcaggagaattgcttgaacccgggaggcagaggttgtagtgagccaagatcatgccactgcactccagtctgggcaacagggcaagactctgtctcaaaaacaaacaaacaaacaaaaaaaagagctagttacctttatgggcaactggggcacagtcccagaggggccctcaggggatgatgtggagtataccgcaagattgtctcaggaagggttggggaaactgtgctgtttatccgcaatgaccactctcagcggttgaaggtggtgcccggggccagcaactccagtacacttcccttcccacacatgtgacctgccatgcgcacatgaagcacacaggctctgggcagagagatgcgggtgccggaggttgggtatacgtcaccagcatttatagaactgtccatctagcttcaggcagctctcttgagtgggctgaggaggatgagtgagcactgatgctggccaggaaacttaggagaaggaggggaaaggaagaaaggaacaaaactaacatttataaagtgcagggtagttgccagccattagcacagttactttcgttttctgattcccattgtacagttgagaaaaacgagctcagagagggaaagtgacttgctcttgactatgtgacagttaagtgctggaattccagctcagattgagtctacaaagacagtgttctctatctccctcttccttttctccttgtcctcctcttctctgcttttctctccctctccctcctccccaccaccttgtttattttttttccaaataatatttagagttaccaagacagaagtcaagaggaaagctttctggtgtccttaaagatgtgctttatgaaagatagttttcatttgctcttttattcatttgacacatttattaagcacctatgatacgcaatatatagaaaacaagacagacacaatccttgccccttaggctttatactctagcaggaaaaggaggcattaaacagctaaatacacatggcgaggagggggtaagggaagcctagatggggaagtgggggagtgagatgggaacaggaaggcagccataaaaagcaattagttgattacgttgtgatacaggtttctcaacctccgcattagtgaaattttgactggatcattcctgtaggctgttctgggcattgtaggatatttagcagcgtctctggcctctacccactagatgccagtagcattcttaccctggttttgacaaccaaaaatgtttccagacattgtcaaatggcccctggggggcaaaatcactcccagttgagaaccactgtggtaaataagaaaggcagatacgaaaacatgtaacaaggaaacagaatctaggcatacccacaaggaagtgcctttaggacgagatccatgtgacaataggcattagccaggcagaaagcaggaatggcatcctaagtagagtagacagcatgtgcaaaggccctgtagccagacctgaaaggatactggagaacagagagtggcctggtgaaatgggcagggctcagttcacacagggccttagagtctgagttataaattttagcctttatccatggtcacttttccttttttttttttttttttttgacacagtttcagtcttgttgcccaggctagagtgcaattgtgcaatctcagctcactgcaacctccgcctcccaggttcaagcaattctcctgcctcagcctcccgagtagggatgtgccaccatgcctggctaattttgtatttttagtagagacgggggtttctccatgttggccaggctagtttcaaactcctgacctcaggtgatctgcccacctcggcctcccaaagtgctgggattacaggcgtgagccaccatgcccagccacttttacttttaaaattcatttcagcatggttaaaataataaaaataaactaaatgacaacagacaacatcaagtgctgactaagatgcagagcaactggaactcccatacactggtggaaatgcacaacggtagagcttctttggttgtttttttttttctttctttctttctttccttccttccttccttccttcctttcctctttctttctttctctctctctttctttctttctttctttctttctttctttctttctttctttctttctttttttgagacagagtcttgctctgttgcccaggttgaggtgcagtgacacaatctcggctcactggaacctccacctcctgggtacaagggattctcgtgcctcagcctcctacagtacagcttctttggaaacagtttggcaggtttgtttgtttgtttgtaaagttaaacctacggttatcatacaactcaccaatcctggccaggcatagtggcttatgcctataatcccagcactttgggaggccaagatgggaggattgcttgaggtcaggagtttgagaccagcctggtcaacacagtaagaccccgtttctataaaaataaataaataaataaataaataaataaagtaaaaatcccacttttagaaatatacccaaatgaaataaaaactgtttatttaataaaaacacaaaaacctgtacaagaacgtttatagtggctttattcataaaggccaaaatatgggaaaccatctaaatgcccctctactgaggaaagattgaacaaacggcagtacatctgtacaatggaatactactcacgagtaacaagatgagaactctttttttttttgagatggagtttcgttcttatcacccaggctggagtgcagcagcatgatcttggctcactgcaacctccacctcccgtttgcaagcaattctcctgcctcagcctcccgaatagctgggattacaggtgcccgccaccacgcccagctaatttttctatttttagtagagacagggtttcaccatgttgaccagggtggttttgagctcctgacctcgggtgatccacctgccttggcctccaaagtgtggggatgagaggcatgagccatcgcgcccaggtgagaactcttaatacacacgatgatgtagatgaacctccaaagcatcatgctgaattatagaagccagactcagagggtacatgttatatgattccatttatatagtcttttgaaaaagggacaactataggaacagaaaacagttaagtggttgccaaaggctgggagtgggcacaagggtagactacaaagggtccccaggaaattgggaagacaattaatagaatggttctaaaccttgactgtggtggtggttagatgactgtgcatttgtcaaaaaatacagaacccagtcagccaggtgcggtggcttatacctgtaatcccagcactttgggaggctgaactgggcaaatcgcttgagccgagaccagcctaggcaacataatgaggccccatctctacaaaaaatagaaaaaattagttaagcttggtggcgcctgcctgtagtgcagtcccagttacttgggacgctgaggtgggaggatcgcttgagcctaggtggttgaggctgcagtgaaccaagactgcaccactgcactccagcctgggcaacaaagcgagaccctgtctcaaaaaaaaagaaaaaagaaaaaaaatcacagaactgtatactagataggatagattttactgcaggtaaataatgcctttattttttgaaagtaaaaagttattataatgaagactctacagtaggtctatcagttgcacatttggggggaaatcaagctgggttctggttcaaggaaaaaattaagaaaggtaagaagaaaaagaaaataaattttaaaatctaaaaagaaaaagaaaatagtccgcgtgtggtgactcaggcctgtaatctcagcactttgggaggctgaggcaggcggatcacctgaggtcaggagttcgagaccagcctggccaacatggtgaaaccctgtctctactaaaagtacaaaaattagccgggtgtggtggccggcgcctgtaatcccagctactcgagaggcttaggcaggagaattgcttgaactcaggaggcagaggttgtagtgagccgagattacaccactgcactccagcctgggtgacagggcaagactctgtttcaaaaaaaaaaaaaaaaagataaagaaaaagaaaataaatcaagcttggtaagaactatgaggtaaatcttgactcccggggggactcgggtaacaggaagctagatggtggtcatgctcaccatttgaaccacatgtacctatgagcaaacgaaagaaagataaggcaatgcagacatttggtgctggttgacaggaatgactgttttccagcacatacaaaaaagattgttccaaacaggtaaatgcaaaagcactctggggaaacagtgctgggttccacacttatcttcgtgagctcagctcatggatagaccaacctgcaggaggaggagaaacctcaactgagcagaaaataatcctcagactcttggccatcttcagagtagacatgtgtttaatcttgactccatttcaggagctttgcagattttctataaatgtatcatgaaaattcaatctcaaaaacaggaggttgacataacagtgaaaattcagtagatcttcaaagctacatctggcccatccaaaccccagatcaaacttggatttcatctttttaaatgaaactctttggtgtcaatatcaataaagactgtctaagcctggcacggtagctcatgcctgtaattccagcactttgggaggccaaggcaggtggatcactcacttaaggtcaggagtttgagcccagcctggctaacatggtgaaaccccatctctactaaaaacacaaaaattatcgtggtgtggtgtcgggtgcctgtaatcccagctactggggaggacgaggcacgagaatctcttgatccggggaggtggaggttgcagtgagccgagatcatgccattgcactccagcctgggcaacagagcaaggctctggctcaaaaaaaaaaaaaaaacacacacacaaaaaaacaaaaaaactgtctggtgagtcaatgacccttgcaatttcaaaactgcggttttcatctgatggctggtgggacttccacagaactcacaatgttaattccagaaaaaaacaatgaaaaaaaatagcaaatgacagaggcatagaccaatgtctgtatgtttatatgagtcccgataaatccgatataagtggtgtttttaagtacaaccataaatagtacggctagcacgtgtccctctggctctgcaagtagcagctgtgaggccagaggaagtcccttcatctctctgagtaccagcgctctcatttctgaaatgcagatggtaataggacctgtccctcagggcagccgtgaaaattaaataagatgatgtgtgtaaaatgctcaataaggtgatatcttagttttctattgctgctgtaagaaattaccataaatttagtgaccgaaagcaacacaaatttattatcttatagttctggagtccagaagtccaaaaatgggtcttgtggagctaaactcaaggtgttggcagagctgccttgcttctgtggaagaatctgtttccctgccatttccagcttctaaaggccgctcgcattccttgactcgtggttggtccatccttcatctttaaagccagtggcatagcatcttccagtctctctctgaccctgctgccttcctcacatggccttctctgactttgaccctcttgcttcccttttataaggacccctgtgattatactgggcccactgtgctaacctagggtaaccccccaccacccatctcaagatccatattttaatcacacctctaaagccccttttgccatataaagtaacattcacaggttcaagggattagggcacagacatctttgggggagaccattattcagtctaggtagctcttatatcttgctggttgtaaagacgctatggccatgtagaataataatgatgacataaaagtaaagaaaaaagagatgctctcaaactgctggattgaaagcttgcatgagaataaaatactggaagaatacacaactaaatgctgattgtgattagagttaaatccgtgtaaccaggggtgtttgttttttttccaatttttcatgatgcttttttattacttttataataaaaatatttttaactaaaatattagtaatacagtggatgttcatcccctccaaatctcatgtggaaatgtgatccccagtgttggaggtggggcctggtgggaggtgtttgggttatgggtgcagatccctcatggatggcttggggccctccccatggtaatggctgaattctcactcagttcgttcactcaagagctggttgtttaaaagagcctggcatctctcttgcttcttctctcaccatgcgacatgccttctccggcttcacctcctgcagtgagtaaatgctggcactgtgctttctgtgcagcctgcagaaccatgagccagccaggtaaacctttcctttataaacaactacccagcctcaggtattcctttttttttttttttttttttttgaggcagggcctcactctgtcccccaggctggagcagtggtgcgattgtggcttatgcaacctccacctcccaggctcaaacaatcctcccacctcagcctcctgagtagctgggacttactggtgcatgccacctgtattttgtatttttagtagctactttttgtatttttagtagagaaagggtttcaccatgttggccaggcttgtctcgaactcctaacctcaagtgatctgcccccttcagcctcccaaagtgctgggattacaggagtgagctaccccgcccaactaatttttgtattttttgaagagatgcggtttcaccatgttgcccaggctaggttttcctttatagcaatgcaaaatgaactaatacaattagtaaatatgaaaatagaaatatctttattttatatgtatattatattgatgtatttttctggttatcaattgctgcatgacaaactacctcaaaacctagtggcttaagccaggtgtggtggctcacgcctgtaatcccagcactttgggagccgaggtgggcggatcgcgaggtcaggagatcgagaccaccctggttaacacggtgaaaccccgtctctactaaaaatacaaaaaattagctgggcgtggtggcgggtgcctgtagtcccagctactcgggaggctgaggcaggagaatggcgtgaacctgggaggcggagcctgcagtgagccgagatcatgccactgcactccagcctgggcaacagacgtaaacaccgtctcaaaaaaaaaaaaaaaaaaaaaaaaacctagtggctagtggcttaaaaacaacaattatttataccactcacagttctatgggttgacagcttagctgagtggctctcacatgggggtctctcatgcagttggctactggagcaggaagtccagaactgacccagcatcatttccactattttctattggtcaaaacagtcacaaggtcaagcccaggccaaattcaagggggctgaggattagaccccctatctcaaggaggagtggcacacacatatggggagggaaggaattgatgacagtcatctctaaagtcaagctaccaggctggccaacacagtgaaagcctgtctctactaaaaatacaagaattagctgggtatggtggcacatgcctgtgatcccagctactcgggaggctgaggcagaagaatcacttgaacccgggaggtggaggttgcagtgagtcaagatcgtgccactgccctccagccttggcaacagagcaagactccatctccaaaaatatacacaaaaataataaagtcaagctaatatatatcatactgtccctctccccacccctcccccatatcattccaggatgtctccctcttctttgtaaggaatgtcactgaggaagttcatcccagttgaggtgggcttttttgttgttgttgcttgtttaacatccgttccacttcccatgccagtatcccaagcttcctgtggaggagcttcaggtcaaccacagtgccttgtcctctactattctgtaaatgggtatgtaacccaggccaagccaaacaaaccctctctgaaatttcaatctcaaacagaatgacaaaaaaaagttctgaaagaaagtttgcagtggaaactgtggatgactctcaccaggctattatatcccaggagcagggatgtgcctgatttgtctaagccaaggtttctcaatatcaggactgttgatatttggggagagttcattcttttctgtgtgcaagggatgggaaggagctgtcctgtccattataggatatatagatgcagccccagattctacccacgagatgccactagcacctctcctagttatgataaccaaaaatgtcttcacacgttgtcaaatgtcccctgggggccaaaatcatcccttgtgcctcttgctgatgattggttcaggagtgaacaggcccaagccagttttgcccaataggacaccaggggagctggctgcagtggcttacacttgtatttccagcactttgggaggctgaggtgggaggatcattgaggccaggagttcaagttcagcctgaacaatatagtgagaccctgtctctacaaaaaaaaaaaaaaaaagttttaattacctgggtgtggtggtgcactcctgtagtcccagctattcaggaggctgaggtgggaggattgcttgagcccaggaggttgatgctgcagtgagccatgatcacgccactacactccagcctgggcaacacagtgagaccctgcctcaaaaaaaaaaaaaaaaaaagacaccaggatagatttcttggggacttctggcagtaacatttccttactctcaagagagagctatggggagacactccctctctttcgcactggatgatttagcaaatgatcttaccgtcataatcactactggcagcgtgccccgttttgcagccacagggaaccagttttcagataaagccaacacatggatagtaatgggaagaaagagagagaaccctggatctcaattacattcttgaacctctgaatcaaccaaccttggtgttgcccttcctacaataaactcccttactgcttaagccaggttgagttgagttttctgttacttgcagccaaagcgtcctgagtgccgcaccctcagagctgaagagcacactcgtgagttgatgccagcaagatcccccagcgcatcatgtggccaattctttctaaacttggtttcagagctttcttgctccatttctaaaaagcaccttatatccttctaacaaattccttttctgtttctgttggtaagaaccagtttctttttccttctttctttcttttcttttttagacgcagtttcgtccttgttgcccaggctggagtgcagtggcgccatctcggctcactgcaacctccacctcccaggttcaaccgattctcctgtctcagcctcccgagtagctgggattacaggcgcccgccaccaggcccagctaattttttgtgtttttagtagagatggggtttcaccatgttggccaggctggtcttgaactcctaacctcaggagatccgcctgcctcggcctcccaaagtgctgggattataggcatgagccaccacacccggcctgaccagaaccaatttctgtgatatgcaatggaagaattctgttacctcagttggctaatttcagcaaaaagccccaacattcttagtcatcataaaactcgtttgctgagtatgactgactcacctggtatttcataaagtgctacttatgagacccacaagaaagattaagcctcatgtgaacaggctgatgggaaatccacacagaaaatattttgataagttctaaagcagcaccacatgctttagaaggtcatgccaaaggcagtccaatggggtcatcccagtgcatcctaaggaccaccagctccagcaggagaattaggtaaaagggcaaggagaacagcacacagggtcacagagaccctggctccaccaccagctcgctctgtaaccctgtgggagtgagttgagggagtgcgttgcttctccctctgagcctcagttgcctcatttgtcaaacaagcattcacttctcagggctgatgtgaactttaactgaggtgacacatgtctaactggttcaggggtacgtctcaacttgttgaggtgtaactacgaaaccactttatttttacaataattgctaccaaatggtctctgttgaaatttcctttttccctctggggaatgatcagaataacagagtagtggtagtagaggcaggagcagaggtagcggcaagctcccaggtggccccgcctctgtgccaggcacttgcctaagctcttggcatatattactcaccaaatcttcacaatgagcttctgaggtagggaccaatagttatctccattttacagaaatagagaaaaaagaacttaaatgagttgcccaaagtcacggagctattaaagaatgggcttcctcaaccagcctctcaacaattccatagcatgcctgactgactctttggttaccaaagctgtctatttcaggtcttaaaacccaaatctcctccaattagaatgtcagtctcaaccagtgaagcacaacgagacccagtctcatggtcatgatgtcgaacaaacgaagacagacaccaaaaagcatgcacggcatgattccatttatgtgaagttcaaaaacaggcaaaagcaatccagggtgttagcaggatagtggtcacccttggcaaagggtagtgactaggagggttactaggtagctttctgaggggctgggagagttctgtatcttgatctgggtgcaggttatgtgagcatgtttagtctggggaaattcactgagccgtgcacttatgatatatctgtgtgcatgtacacacatatacttttctgtatgtgttttatagttcaatataaatttccttggaaaaaacttcattctcagatctgattcaaagttcttttagatcccctggccccatgtcacccagttcaagccagactcatgattctagtggcttggagctgggacaatgggtagggggagcaggagaagcaagacgtgctctctttccccttctccttgacgcccacggtagaatgggcataaggatgggctgccattctgctgaaatggctccacagcgagccgtgaaggaaggtggctgaccccaactgctgaatgacctttgaacttaggccaagagactcagagcacccctaacatcatcctgttgcacatgtaaagtgcctagcacaaagcaggtgtgtaatggggggggaggtgctagatggagatgcaatatttttgatatcttgaggactaaaagtcgggatgatctgctctttcaaatatgccagaaatttttggattcataatcagttgaataattgatttctatttgaagccttttagttagacaaaaggaaaagtgataagtctgccatcttcatctgagttcctccagaagccaactctgagacaaggatttaaatgcaagtaatttattcctgaggagatccttggaggcagcaggtgaggagtggggaagtgaccacgaagtttctgatttaggacagtggtgaaaagttgatgcaggtggcttctaaaagatcttgacttccaaggcaactagggctctggggaaggaatatggctgaacttcagacccatagggctacaggaagatagagacagaagacaaagaccatgtaccagttagcatgctctcaactgcaagtagcaagccaatccaaagtggcttaaacagtaaaaatgctcctgatgtcttcaaataatgtcttcaaataatgtctgggaagggacatgaatgagcatgtgggccagtggggctcaaacccacccatgtaagggccatgcctccacattgccatacctgagaagcaaggagctggggtatttatctctttcgcactttgggaggctgagcgggcgaatcacctgaggtcaggagttcaagaccagcctggccaacatggtgaaccctgtctctactaaaaatacaaaaagttagctgggcgtagtggcacatgcctgtaatcccagctacttgggaggctgaggcaggagaatcacttgatcccaggaaacagagcttgcaaagagccaagattgtgccactccagcctgggcaacagagtgagactctgtcaccaaaaaaaaaaaaaaaaaaaaaattgataaaaagagaaagagagagacagagacctcagaaagacagagtgaaagggaggggttagaataaagggaggatgaagatcgagatgaagtgacagagagacctaagaacttgtgaaaatgtgcttaccaaaatgtgagcagtggccaggcgcggtggctcacgcctgtcatcccagcactttgggaggccgaggtgggcagatcacaaggtcaggagatcgagaccgtcctggctaacacggcgaaaccccgtctctactaaaaatacaaaaaaaaaattagccgggcatggtggcgggcgcctgtagtcccagctactcggtaggctgaggcaggagaatggcgtgaacccgtgaggcagagcttgcagtgagccgagatcgcaccactgcactccagcctgagggacagagtgagactccgtctcaaacaaaaacaaaacaaaacaaaaaacacacacacaacacgtgagcagtgaccagcacaggtagtaagagttaaaagtaagttgtgggccaggcgcagtggctcacgcctgtaatcccagcactttgcgaggccgagacaggcagatcatctgaggtcgggatttcgagaccagcctgaccaacatggagaaaccctgtctctactaaaaatacaaaattatccaggcatggtggtgcgtgcctgtaatcccagctgctagggaggctgaggcaggagaattgcttgaacctgggaggcagaggttgcggtgagccaagatcgctccattgcactccagcctgggtagcaagagtgaaactccgtttaaaaaaaaaaaaaaaaagtaagttgtgtctcttttatatgcacttttcaagttttcttcattaaatgagtattccttttgtgataagaaaaagaaataagaacaacaaaaatgtcctacctccaatgctagaacttccagctctgcgtgtgaaaacacccactttaaattgcttctctctttagttcaaccatgtttcttgaaatggtttgaatacaggcagagtttccttctctccctccttccttctttttccttttttttaaaggagaccaaagtcagagttgcctcagtgctgacccaacattgaggctgaaagtgggtacaataagggtaatttaagaaggcagggattaacagctgctttggaaatgacaattgggttaacctcttcttcattctcactctctctctctctctctctgcaagaaccatcttgccctagaggaatgcaggaaggcagtggggagggaaaatgactctgtttagggaggtgataaaatgggatgtgatgattaattcttcatatatttatttgacaagcattcagggagcacctcttctcgcccaggtcctgggctaggccctggggacatagcaagatgaatactacaggatccacgactgtgagggctgagagagacacacgtgcagattgctaagaccaatatgagaggatcattccatacccaaacacagagttgcatgaaggccgaggttctgctttcaccccaccagataccaatttcgctcctgaaatgaagaagtaaggagtgaccagagagaatcttatttagcaggcagtgatgataagttaatacaggtagtttccaaaagatcttgacttccaaacaactggtgctctggggaaggaatgtgtctaaacatgagacccatagggctaaaggaaggtagagacagaagacaaagaccctgtatcagttagcatgctctcagctgcaggtaacaaaaaaaccaacccaaagtggcttaagtagtaaaaatgtttatgatgtcttcaaataagtccagagctaggcagtcccagggacaattcgataactcagtgatgtcaaggacctaagtgctttttatatttttgctcctctatcttagcctggttttaaaaaaaaataattcctcccatatgtctctcttttttttttttttttttttttttttgagacggagcatcgctctgtccccccaggctggagtgcagtggtgcagtcacggctcactgcaagctctgcctcccaggttcatgccattctcctgcctcagcctcccgagtatctgggactacaggtgcccgccaccacgcccagctaattttttctatttttagtagagacagggtttcaccatgttggccaggctagtcttgaactcctgacctcaagtgatccgcccgcctcggcctcccaaaatgctaggattacaggcgtaagccaccatgcctggccccatatgtctcctttacaagaagggaaaatctttcccagaagctcttgggcagattttgcaatactgccattggccaggattgagtcccatacccatgccctgatgcaaaggaggctttgaaggggcctcccagttttttcttcttggcactgtcagccaagaagaagggggaagagaaagatgaatagataggcaaccaacagtgtctgcctcagaagggaattaacattcactgggccctgtttataaccccagccatcccccagatttccagcttcctctttaatatctaacatcggaaccccatgaccctaacaagacagaactttcatcaggttctttctgcaggatattactcagagtctctgggggatgttctcatgttccctggaccatgcttgtgattgcttggcaaccacagtgagccctttctcccagggcatctactgcccttgtctgccacctcctaactgtctgcaccaggatggtgctcctgtcactaacaccatctcaacttgaaagtagtacccagccctcttccttaacagcccccaaaacatggctggattgattagaatataggtttaattactgtaactgagaccctcattaacagcggtttaaacaaagcagaagtttattactttttttttttttttttgagactgggtttcgctgtgtcacccaggctagagtgcagtggtgtgatctcggctcactgcaacctcctgggctcaagtgtttctcctgcctcagcctcccaagtaattgggactacagggatttgccacaatacctggctaatttttgtagttttagtagagacggggtttcaccatgttggtcaggctggtctcgaactcctgacctcatgatctgcccacttcggcctcccaaagtgctgggattacaggcgtgagccaccatgcccagcccagaaatttatttctaaccagtcagaatgatacctacaagcaatcaggatgactgtagctgtgcatatcagctgaatatcagcccttttatgtcttgttcatgtaacagtgtgtgtgatcagtctggggctaatggggctggcccatggggtcagagtctcaggctttttctatcttgttttcttccatcccttccatgttgctcttgtccacacagttcaagttggtgccaccatgtcacattccaggcagtactatggaagaaaaggtgaaagaaagaccccaacccagccgggcttggtggctcacacctgtaatcccagcactttaggaggccaaggtgggcagatcacaagggcaagagatcaagaccatcctggccaacatggtgaaaccccatctctattaaaaatacaaaaattagctgggtgtggtggcacgcgcctgtagtcccagctactcaggaggctgaggcaggagaattgctcgagcctgggaggcggaggttgcagtgagctgagatggcatcgctgcactccagccaggcgacagagcgagactccatctcaaaaaaaaaaaaaaaaaaaaagaaagaccctgaccccaccccacactgttcctgaaccaagcctttaaaggcatgatttagaaatggtgcacgtcacttccactcaggtcctattggtcagcatgcagtcatatggcacatctagttgcaagggaagttgggaaatgtagtctttagccaggcaggcatgtgcccagttacaatcctgtttctatgaaagcagagaactgacactggggacaattagtatctgacccagcagctaagatgagcccatagcagttaacaaaattttactgaagccttggggataacaggtgagaattacaatgcagaaaagggaaatgcaaaatgaaattgtaaataaatcatgtttggaggccatatagctgcttcatgctttccttcctgctggtcttcaccctcctttctctctagcatgctgtcatgctgtgagaaccagcctacctcccgtggatgatggctgcctaacttcttctccctagaatttaggaccccctctttctcctctttgccccaggtaaagcaaaaggccctccccttcccacagtgagtctggcttccttgcctaccccaggatatgggcagtgggaatatccatgtcctcctgaagaaagtacaattccccatgtggttccccttgcagctcacttccctgtggcctggatgaggccatcacaagagttgtaagtgcgatcccctaagcccgggtccctccactttcagttattccaaatcagagtcctctccaagggcttcccaccagcacaaggggaaggaaagttcaggtcagcgcctcttctctgcacagtcaagtctcaaacagaagaccagtttcatcttcaaatacagaaactgctggagcaaatacttggtcaaaaaggtacacatctttcccaaggacttcaggaacccttctagctaaatcaaagcttagaaattcattcctcttttctaaaaggctatggtcctagtacagatccacccaacttacatgcattatcacaatgctggtgtgcaacagtgggcaagtcatgtatcactccaagcctcagtttcctcatctgtgaaatgaggttaatgacagtttctcttacagggttgttgggaagatgtagagagatgataaaggtaaagtgctagcttagtgcagagcctagtctttcgtcaaagcccaatacatgtagctaacataactagtattattaaacaataagaaacaactcaacatggggaatctgcatctggataatatcactgtcttaggattctccccaagagcagtgatttctcccagaataatggaagaacattctcatcttcaaagacaaaaatggctccaaatccccttcaaaaacttgaaaaactagacttcacctccagaactggttacataagctcaatgcagaatgaatatgcggggctccttgttcaaacattattgcgagtttcggccaggcacagtcgctcatgcctgtaatccctgcactttcagaggccgaggcaggtggatctcctgaggtcaggagtttgagacaagcctggccaacatggtgaaacctcatctctactaaaaacaccaaaattagccgggcgtggtggtgggtgcctgtaatcccagccactcgggaggctgaggcaggagaatctcttgaaactgggaggcagaggttgcagtgagccaagattgcaccactgcattccagcctgggcaacggagcaagactccatctcaaaaaaaaaaaaattattaagaatttcaaggctgggtgcggtggctcacacctgtaatcctagcaatttgggaggccgaggcgggcagatcacttgagatcaggagttcaaaaccagcctggccaacatggtgaaaccccgtctctactaaaaatacaaaaaaaaaaaattagccgggcatggtggcaggtgcctgtaatcccagctactcgagaggctgaggcaggagaattgctttaacccaagaggcagaggttgcagagagccaaggtcacgccactgcactccagcctggacaacagagcgagactcagtctcaaaaacaaacaaaaacaaagaaacaaacaaacaaacaaaagaatttcaagacaaagacagcagagcaaacaagtgcaggccccttctgagctcgggactctgcaatcacacaggttgcacacacacccatgaaaccagccaagttcacctacagcagcagaacaaaaaatagggttgtaaaattgcaggttgcaatatatattatgaaaaacttctgaagacagatggtagcttgcttttttccactcagcaacttacacaactgtagaacaacagcaaaatttttgagtccttgctgtgaactagagaccaggctgagtgctttacacacatactctcatttaatcatcacatccctgcattctgtaaaagatggaaaaccaaggattggagagggtaaggaacttgcccaagggcacatgagcccaattcagcctaattccagaacccacacccagaaccaccatgtgtacagtgaaagtgcccccgcaagcctcagccctgcaaactagagtgtggaggatgttgtaggggcctctggaaaccctccccagactcctcctttgctgaaagcatggagctgggaccggtttccatctttggatccaacttccctccttgaactttcccgcacatctctgaccctcctttctcagaacacatgtgattcccctagttccccctgaatgcctcctcctcccccaccggggaagttgctcttaccagacaggcagcgtgggattatgtttacgcatttatttttgtttctttttaatgacttgctgtaaagcttaaaatgtcttccgggtggtagagaggcaggggagtcgcccattaaaaatgaagcccagtaaaaatgaagcccagtagagacgtgagtgggagattctgggctgttaaccttcccgtgagttctgaaatagtgcagaactcatatatttaatatagtttcagaactagaagcagcaaatagagctgaactgggttcaaatcctgactccaccatttctcatctgtgtgactgtgggcaagttgcttaacctctctgtgccacggttcaaatggagatcacaatagtacaggctccagagtggtggtgttaatgaatgattatcgttattattatcctcattgttattactattgtttttagagctcatgggagtccttggagagactgtatagcttcatggctgagaatatagatgctgaaatcaggctgcatctgggattaaatcagggatttaaatcccacttgactacctactggctgtatgaccttggttaaataactggcctctctgagcctcagtttcctcaattgacaaattctcccctgggcagagggattggattagagatggcatgtgagcttcagttggatcaatgagactcaaggccaggactcagggtccaccagggaaaagaagctcttcccactggagctgctgagctgataggctgtgagcctggggctgctggggctctagaggacagcctgctcgagagtgaagctagcacaggggaagaaacataaaagagctggggagagagagagtcacaatgacgtttgaggccctggatctggcggtgcctgaagcaaggaagcctcctttggacttcccaatttcatgagccagtaaattccccgttttgcgaaagccacttttcagttgggtttttctcactggaaagtatccaggctgacaccaggatttccatttagcaacttgacccaggcctgcaagctagtgagtagcagcctcaggggttagaagctcctagctctgtaccacggtgctctgtcatccagcatgcaagccagcattctgtactgggtgttcattgctttcacctctttagcctctccgagcagctattttctcatctctcaaatgtggataaacagcaggcttgcagggctgttgggaaacacaaaattcaaagtaatgcttttaggccaggcatggtggctcacgcctataatcccagcactttgggaggctgaggcgggcagatcacttgaggtcaggagtttgagaccagcctggccaacatggtgaaactccatctttactaaaaatacaaaataaattagccaagcgtggtggcaagtgcctgtaatcccagctccttgggaggctgaggtaggagaatcacttgaacgtgggaggcagaggttgcagtgagccgagattgtaccagtgcactccagcctggggcaacaaagtgagaccctgtctcaaaaaaaaaaaaaaaggtaacactattagttagcatggtttatggctgaaggttggagttctgtgcacccagtttctagtgccttgggccttggcttttccccattacttattccattgcagggatgtctctggctgtccctaagtcagccaaccagtcaaagtgcccaaactctcttaggcgagcatgggtgaatcttgtggggggaagagccatcttccttcctggctatgtgtacccagtggtgagtggaggaagctagatgaccttgaggattcttgaactctgagtctatgatgtacaaagaagccctgttatgttcatttccagaaccttctaaaactgatatgctcttctgggaatgatctgtattgcagggaaacagcaatgaaccaaatcgacttagtctctttctttaagaagtttacatttactggcagatacagatgataaacacataaaaatatacaacatcatatcacatggtaacactagggaaaaaataagtcattaaatgcctgctaagtgccaagaagaaaaaggaatagagtgatagagcactgtttattagaagtggtcagaagggggctctctgaggaagtgacatgtcattagagactcagtagggctcattcaggatcacaagctcttaaaactgtgctatctcccaggaagaagatcaggaccaatttttccaggaaacttgctgacctcactaagtcaggagtcagtgatctgttggaggcttggtaaacagccatccttctccactgacgactcttaggacatttaaaaaagtttaatgggtcattgatttgtagtgctgatttcctccattagctaaatccacgaaggaaaggctggagaagccgcgtgagaccattcctcaggcatgcctgccaggaaaaggttttagccatcatgtcacatgatcatttgtctatttctaaccagtcatcactaaagattcccaatcaccaccatcacatctctggaggatcccagggcatggctgcttctaggccaggccttggcagggaagtgccagagctttgcagatcaacaccaagcctcagagagtcggagtagaccttaagttcctcctctcaaccaaatatcaaggaaacagacaagaagtcgaggtccctgccctcctagaacatgacattgaggggcaggagaaagaaacaagccagcaaataaataagacacagatgagtgctaggagccaccagaagctagaacaggaaagggaggatcctcccctagagagtgactggggactattttagggaaggtggtcaggggagacctgtttggggaggtaacgtttgacctgagacctgaaagctgagaagatctgcaagaagcgtgatccaggcagaaggaacagctggtgcaaagatgctgggttgggagccagccccgtatatttggagatagacctgagactgcagggaagtaagcgaggggacacagtgacgggccaggtcacgtgggccttgtgggccagggttagacatgatttgggttttcttctaagtaggatgggaaactgttggaggattttgcataggagggtttcatgacccaaatattaaaagctatgtacacaatgaatggaagggcaaattagctggtacctgaaattaggggtttcgttcaggatcaatatttgtggcaaggtttcactctctgccactgtagtagattgagtggaggcctccaaaaagatatgtccaagtccccatacctgtaaatgtgacctatttggaaaaagggtctttgcacatgtaataaatttaagaatcttgagatgggattgccaaatcgttctggataggatgagccctgaatccaaagagaggcatccttgtaggaacagggcagagggaaatggggcaggcagaacaggagatacagagaagaaagtctgccaagacagaggcagggatcagagtgaggcagccacaagccaagtaatgactggagctaccagaagctggagaatgcaaaggaggaccctcccctggagccttcagagggagcacggcactgtcaacaccttgattttggactttgggcctcaagaactgtgagagaataaatttctgttacttgaagccaccaaatttgtggtaatttgttacagcagccactggaaacaagtacagcctctaaacagcccaaacttggaccctgcttgaggctgcctccaactcccctctcccccaccaagaccctgtgtatagcttcggccccattcaaaggctactccaggctgggtgcagtggctcatacctgtaatcccagcacttcgggaggccgaggcgcgcggatcacctgaggtcaggagttcgagatcagcctggccaacatggcaaaaccccatctctactaaaagtacaaaaatcagctgggcgtggtggcgcacacctgtaacctcagctactaagaaggctgaggcaggagaatcgcttgaatccgggaggtggaagttgcagtgagccaagatcacgccattgcactccagcatgggtgacagaacaagactctaactcaaacaaaacaaaacaaaacaaaacaaaacaaaacaaaacaaaacaggctactccagtcactgggcagcaccccctgcaggcgtgagggccacttgggcttgggatgggcatttatttacttacttagcttgacatacagggacaggaatgaaccagccctgtttttgttccaggatgctctcaggattgtgagttccagacaaaccagaacccaaaaagtataagggtttaagggcgggaggagcacaggagtctggacagtcacttaaaggaactaagacttcaattaggtagcttccaagtgtggcagctcccacagttttcactggaatgggcatttttgttaatttttcccctatggaatgctcactttctaaagacactgctgatcaagctaattgcatgtattcaataacatttcatttatctcctttatttgctattatttaaagatatgtagtaatgacagttaatatttattgagccactcagtatactaagagcatgatatgtactcatccaaccttcacatcagccctatgaggtgggcacttttattatctctgttttacaaaggagagcagagactaatgaaaatttgcccaagtttgcaccactagtatttattcagctggaacctggacccacgaagcctggctccaaagcaggctctggaaaccaggctagaatgcaggtttccataccaatgtgcaatgctactctggacaagtaattttgtctctctgtgcttcagtttcctcatccattttttttttttaagacagagtcttgctctgtcacccaggcccgagtgcagtggtgtgatcttggctcactgcaacctctgcctcccaggttcaagcaattctcctgtctcagcctcccgagtagctgggtctacaatcacacgccaccatggctggctaatttttttgtatttttagtagagatggggtttcaccatattgatcaggctggtgtcgaactcctgacctcaggcgatcacccgccttagcctcccaaagtgctgcgattacaggcatgagtcaccgcacccggtccccccctcatctaattttttatttttattttaatttaatttattgtatttatttatttattttttgagatggcatctttctcccgtcgcacaggctggagtgcagtggttcaatctcggctcactgcaacctccacttcccaggttcaagccattctccttcctcagcctcccaattagctgggattacaggtgtgcaccaccacacccatctattttctgtgtttttagtagagacaggctttcaccatgttggccaggctggtcttgaactcctgaccttaggtgatccacctgcctcagcctcccaaagtgctaggattacaggtgtgagccaccaggcctggcctatttttatttatttattttttttgagacagtgtctcactctatcgtccaggctggagtgcagtgacatgatcatggctcactgcagcctcaatctcccaggctcaagtgattctcccatctcagcctcctgagtacctgggactacaggtgcacgccaccacagccggctaatttttttttttttttttgagacaggatcttgctctgttgcccaggctggagtgcagtggtgcaatctcagctcactgcagcctctgcctcccaggttgaagtgattcttgtgcctcagcctgccgagtagctgggattacaggcatgcaccaccacaccctgctaatttttgtatttttagtagagttgaggtttcaccatgcttgtcaggctggtctcgaattcctgacctcaagtgatgcacccaccacggcctcccaaagtggtgggattacaggcgtgagccaccacagccagtcagttttctcgtttataaaatgggaataatagcacctgtattgaagggttgttgtggagattgaatgggaatgtgtacttagaattccaggcatagtgcctgccacaagcactcaaggaatgagctggagttcagctgataataccaggcagtgtctctgggcaacacggaatgaagacaattctctcttccaggttttcaaacctcctggaattcacaacgtccacatgacatgccaggcccagagggggatggtttaaactggagcctgcaggaaggcaacctgaccaacctgctcatgggtgctttaaggatcataggtacgagaatcagctggagttgttggtgaaaatgcagattccgggtctcatccctagaccaaagatatctgaatcatttggcgatgggtccaggaacctgcattattcaacacacttcccaggtgaccgtaaatgtcaaaagacaaaattacaacaaacttaaacatcttaattggcttcattcatgattctagaatcgggcaagacttcattcctcaaaatagcacaagtgtcccaatgagctgagcagaggaggttggttttatagacagaaaagggctgaaaaaagcagaaacaaagaacaaaaagcagattggtcatttcaaagttactttccttgtaaggcaggaacagggaaacagaacaagagagaaataactgattggtcgcatcgggttacttcaggttactttttgttgtaaggattaaagcaaagggaacttcattatgttgattaaaacggtctgcttgggaaatcagggtgtgtatctctcttctgattttgtgaaaggttatcagtctgatgatgtagaactttagcatgagtgactccattttgatttttagtctagtctgttgagaccctaatgccagaactttttttgtttgtttgtttcgctcttgttgcccaggctggagtgcagtggagctatcttggctcactgcaacctctgcctccagggttcaagcgattctcctgcctcagcctcccaagtagctgggattacaggcatgcgccaccacgcccggctaatttttttttttttttttttttttagcagaaaccgagtttcaccatgttggtcaggctggtctcggactcttgacctcaggtgatccacctgcgtcggtctcccaaagtgctgggattacaggtgtgagccaccacacccagcccttttttttcaagacagggtctctctctgccacccaaggtggagtgcagtggcgccaaaacagctcactgcagcttccacctcctgggctcaggtgatcttcctgcctcagcctccccagcagctgggccccaccacaccggctaattttttaacttttagtagtgacgaggtctgattctgttacccaggctggtctggaactcctggcctcaagacatccgcctgcctctgcctcccaaagtgctgggattacagatgtaagccaccgcgcctgggctcctatgatttttatttaacataatgcaccatggaatttgtgctctgcttagttcagtctgagcaggagttccttgatacttcgggaaacactgaaaatcattccatccccatccattcattcctgcagcacccaagtggaaattctgcgtttcagacagggacactacccttagagagcagtgggcttccccagcagcgtagtgaaacatgatactcctgagtttcatgaaaaaagggcagacatctggccagagctgggaggcaggaaatagagcacggtgccctcctcccatactccagcttggattactgaggctggggcccaggccctgcaggaaaggaggtgcatgactactttaaggccactcactctgtgactcaacgggccgggtcggggctggaactcaatgccctcccgggcctggagagcccacgcgccgtgggcggggctcccggggtcgcctaggcaacaggcgcgcgccgcgcccgagcccagagccccaaagcggaggagggaacgcgcgctattagatatctcgcggtgctggggccacttcccctagcaccgcccccggctcctccccgcggaagtgcttgtcgaaattctcgatcgctgattggtccttctgcttcaggggcggagcccctggcaggcgtgatgcgtagttccggctgccggttgacatgaagaagcagcagcggctagggcggcggtagctgcaggggtcggggattgcagcgggcctcggggctaagagcgcgacgcggcctagagcggcagacggcgcagtgggccgagaaggaggcgcagcagccgccctggcccgtcatggagatggaaaaggagttcgagcagatcgacaagtccgggagctgggcggccatttaccaggtgcgggagcgccccggagcgtggcgggcccttcgcttaggccgcttgaacatcccctcagacctccaggccccagactccctctgggtcttgccctctgcctcgctcctactgcttgaggattcgatgggacagcgacgcactgcgtccccccaccctttgtccccggggcgggcgtgtttctcgccgcagcgtcggagcccccttcgatcccccacctcccttctgttctccagctcgggtgatctctcaagccgggggaccgccggtctgtgctctcaacgcgaatccctcgcaccccgaccccgccccctgcctgtccactctttgtcccctggggtgatttagcacccccactatttccttttctggagtggaccacctcagactctcttcctttgtctccctgggggaaaaggttactccccccgtccctccttcacatttcctttcccctagtctcagtgtgcgtcgagtcccagagatgacagtcccctttcccctttctgttcattcatttattggataggagttggcaagcttattctgtgctaggcaccgcttaggcattggaggtggtgtttgctaatcaggacaggcaagatcctagccttagtggggcctagagtcgaatagggcaatcaaacacaaaagcaaataatttcagatagtgacaggtgctgtgaagagaacgacttcctaacggggtacagggtgactgcatagaaggccggctgtcttagagaaggggatcagggaaggcctgtcaaaggaggagacatttgctttgtgagctgaaccaagaggagcagaaagccgtgagaatatggggctaaagaaccttctagccaggaggcctgcggtacccactccattggggccatgatattattctttcaggcagggactcaggaaggttaacgttttaaccctctctaaaatagcatctttcctcaatgagcagcttagtctttggtcgtggcagagatgaccttgtcttaggagtcatctccttgtgtgttaaaaagttaggaaaggagggtttctcatatatctataaaacaagtagttaaaaacacaaagagctcttcctttcacaagcagctgaataagatacatactcccaattaaatgtcattgcgggggttgttaagattaactaaaaccacacttgcacagtatcttaaataagcgatatacagaatagagagattttgttacttgtgtaaagggagacagcagatgattctgttttcagcttataggctcaaaaggcaaattgtgagatccatcagctgtagtattaaaatctattttgagctccgcttagaaaggaaaaaaggtttaagcagttctttggtatgcttgactaacaaaagcctttttttttggcagccttgattttcatgtggatttacatcaagcttatttgacaggattctttttatttggactgtagtgtgtatattagtttctgctagactaatatttctaaccactgtaatctatatactaataagtatgattgatcagtatataaaatttgtatgccatatctggtctctgaattagctgaatgaattccataagggactttgagactgtgtagacaaattttctgcatcagtttaatgcagtagagtctaaaatgtctttaaatgaaaattgttggtctgaagtgttggagttgattatgatacaccccatcacagtggaagcattgtggagagaagtcttttccactgaaattgactgagttgacaacaagaaatacgtattgtaacttagttcttagttgaattttatttcttacaattttaagccagagtgggttgacctgtcacccaagcatggttaaaattgtattcagcatgcaactagcatggagtgtgtcagtcttcaattcatttccttcattgttcttaagtttttctgccacaattaaaccccacaagttagtcaaggtgttgagattttcactgcttcttaatggattgccacattccctgaggtagtttcttttggtcttagagaattgtcagggccagcttttctcacctccactgtatggatatttttcttttctaagatcttgaaatcagaagcttttctcctaagtgtaaaagtagctctttgtcatacaactgtagcgttttctgaaacagagttcagatgaccttgagtctaaagtggctaactttccaaggtgtgtatcgctttaccaaaaccattatttttcaaggattcaaagaatgtgtttacaattgatagaaaatggaagtttaaaaaaattaatactttatagcatgttgaaatgagggcagccttatacaaagtcatactttgagcttgcctagcctattgtgatcagagaataatgtaatttttgcttacaacttggtaagcaggtcagttattctaacttattttctgattagaacaaaaagatgtaaaaacttgaaaactattgggaaaagaacaaagagtgaagaggacttttgagtgctgaggaatgtggcagcttggaaaacaaactttttaggcagagattctttgctaggtcagtttgataaagtgagcataaccgtatttttaatctttaatgctaatgaatagcatagatgctaataagcatctaggtctataaaaagtcagctttgatagtgtatatagatggctttaaacattgttttctagcatttaaacactttcaaatcatccggttgcttgattgggcctagctgtctaagaggagagaatgagcccagatgaggaaaagagattgattttactgagctagaatgagaggagagagggttgagtgaatgaaaagaatagctcatgtgctcccctccatctgtagtttaagaggggttgggtccggtgttttgcttgttttctcgtctgtaaattctttgattctctgacaccactcactatatttcattgtgaatgatttgattgtttcagataaaggggactgcaataataccttgtgacatgaaggcaagatttattcatgttagaggcaggctttgtaaaatgggccactcttccaattgacatttgtttttatagctgttttcattatgaaatacaatctaatgcctgactaggttaaaaccatgttgtaacaatagttcactaaaattccttactgatatacagcttatgttgttatattccaaaaagatgaatattaaaatttgccaataatgtttatttaaatactattttcttcagaggaaaaaaaactattttatgcaaaggagaaagatctatacactatgactcacttcacttaaaaaaaaaaagactaacggaaatgacatggagagactgggaagttctagtcatcttgagtgacccattagatctaaatgttcttgtttagccctggtttgagtgaactaaatttaggtgtctgatcagtactttggaaatggtgtaaatgcctttgtaattgtctggactgatattagattaactgggagcacaagtagaaatagtgaaggaaagaactttttgctattgttatttgacatcactggcatatttataggaatactttggtgtttttggaagtaagtaaaccaaccagtggttctaaaaagtcagctgggggataatggtaatgccgctgtttcttagctgcaagttatctgccgttacttctcctccattttgcattttatcttgaatagctcctcaaaacctattaaaatacctggtattgaataatgtaattgaatgtgtactgaatttcacagtggaaatgaataagaaatttcctgtggaggttttttgacttagctactgaaataacggccttttgttgtgtgattctttcccttttctctttgttaaagaaaactgtcttgtgatcttgtagattacagaatccttttggcaatttctgttcctagcactgctttttctttctttctttcttttaaatagaaatggggttttgctgtgttgcccaggttggtcttgaactcctggcttcaagcgatcctcccaccttggcctcctgaagttgggattgcaggcgtgagcaggtactttttctgaggcctgcctgagcctatatatattttgcacaatttggcattcctccctacagtgtttatgctgatttgtttctggtaacaactaatactggcaaatcggctgggcatgttactttatgctgcccatattcaggaaaattggaattctagctgggtcattgttcccagatgatgtagtttggcaccagccattccatgttcacattttgagtatccaggagggctggggactttggagtagttggtgattccctctgccacatttcactggttggtcactatggcatcctttccaccacactagtagtctaggttctcagatgttgcttatgagcctgcaatggtttctagtttcacactgcagaaatgagtgaagccggttacccgttaatatggtcccatcatcactagagtaattcattgttctaaaaccagatctgagtctctcactcctctgcaactacttctgattctttcataacacttgtaaagtccaaactcctctttagcatggcagccagcttccagtccttccctcctatgtggcttccattctagccagacaagaaagggcagcgttctccaaactcatcctcgcccttcattcctctataccattgctgagcactttgttgaggatgcctctcccgttcaatctagcttgcatcttccagctcgaatgtgtgcttccttgcaccagagttttgttccgtcacctgtgtgttttcatacaagctggcacatatctcttctaaagccctgctgtcattgtagctgcgtctttacaaacattttttttttaaatttttataaagtcaaggtctcactatattgcccaggctggtctcaaactcctgggctcaagtgatcctcctgccttggcctcccagagtgctgggattataggtatgagacactgtgcccagctgtagctgctactttatatcccaggtctatctccaatggagcccaagcttcctgaggccacctgttgtatctttctcattcatcttgaagtcctctgctcctggcacagagtaggtacctaacaagagttgggattgaattgatggtcagtactttgctagcctgatggtataaagatgtacaaaacatgttcctggctcccactctaggggggcaatgatggaaacaaatagattagcccacattagtaccaatagtagaggtcactctgggagaaggcccccaccacattttgagtcatggcctaatgaggtaatttagtattgcctgctgcagtggctttggaagaaaggctggcattcttagccagtagaagctgataccactgatttgtttcacagaagctttaaatataacaataaatttgtgcttggcctacggtgaactttacaggcaacttggaggtaatatgtttgtctctctaagaattgttgaattcctcttccctcatccctcctgactggttctcacaagcctagcgggcctttgcatgtggttggttcataaaatactttttgattttgggatataaaatatagttctccataaaataacgactgttaccaagtctttgattttttttttcaaactataaatggtaatgacattctttggcctttgatcagaccacccttaggggcaagagagtagtttcatgttttgctttttctagtgtcccctgtgtctgggtatagttgcagtctcagctgtcatactaacagtgctgagtgagtcccttactttctttgggttttggtttctcccttgtaaaaatgatcctggactaactgatcattaagttcaggtcaagtaataaaaatccttaatgtactcacaaatacaatttaatgttcctgaataatccttgtaaaaactgcagcagttactcagttttgtaaggtgtggttgggtactattaggctcaaaagtttataggagctttgtgagtatagttaacaactcaaaagaatggggtgttttttcccgaggggcatgaaatgtttttgataaatagagttcatttgacttggtaatgtggaaaatgagtagccctgacacgtacgctatgcttttgcagtttttctctcaagtagcaattgggtggcttttcctgtaaaagatagaggaactgattcttgagaatttacgaaagcttcaaccctaactaggtatgcaaagaatagttgccctttatgttgtaattttaggaagaaacctacatctggtctaagtttcatttgaataatatgatagtttacacatctgccatatttgagaagaaagtacctaagtctccagcattttagaaataatgctttactttgtgtagaaatggtctttagagtttaatagctgctgccctctcctttttcaaagcagcttgacataatcatgagtatcttgctgacagcttgtaaattttgattgtatgaaaactgaaaataagaccatttcacatggaagattccctcctgccctgaaacagccaaagaaaactgtagccatcaaatctattgatctctgggctttggtacaagtcacactactacaaataaaataataccaagtacttataaatgattttcagtccttttaaagtttatttttttaatattttttttgagatggggtcttgctgtgtcgtccaggctggagtgcagtggcacaatcttggctcactgcaacctccacctcctgggctcaagtgatcctcccacctcaggctcccaagtagctgagactacaggcatgtgccatcacgcccagctaatttttgtatttttttggagtagagatgggattttgctgtgttgcccaggctggtcttgaactcctgggcttaagccatctgtctgcctcaggctcccaaagtgttgggattacaggtgtgagccactgtgcccggcccagccctttttttaagagaaaaacgtatgacatcgttcgatttactgagtgcttatggttttactaaggcagtaaggttttatggataccctatggtaattagatagaattagtgctctgaagtcagctctgtaatatggactcagagtaaacatggcaaagggacacttaaggtctgcattttctctgggaaataaacgtattctttactactctgaatctagtgctgggaaattctaaatccttcttgaggattaaccacttgaagtaaagttttgggtcccaagtaggcttgtgtccctgtctccttctctttacttttcagatgtttcttcctagagactgaggtatattttacttttacagatgaagaaggaagcctcggctgtgtttgtggcttttgtgggtgagcaacatcacttgcaaagataagatgagcatagcaaaactaggctttcaaaataatttttaaaaatttcttagtgattagaaaaggaaaactcttcccttgtctctgttaagaaacgtttttcgacttttttcctttcttaatggatcttttattggcacttctcttccttttgcagaatcttacttaaaagtcactacgttacattacagcaaacagcttagctaatttttatccagatgggccccggttacaggattgtacactattgcgaatttcttacaggaaagtgaacatcaagtaattattccaaatagagttctcttaagaacgtgagttacttaaaaatgtctaaggatgaagtcacttctgaatataacttcactcaagagaacaaataagcaaactgcatttagcataacatggtaaattagctttaactctccttgatgtttgaacatttgtcgctgttaactactgtttcacttttcaaatagtcagggcttagtttgcttctgtaaggataaagggaaaatacgccttcactgagtcataaatatttttgtggctaacttttgcacagagaaaagaggcctctaagaaggtacccagtgaatttttttttcggggcagggagagaatatgtcattttttggtttgttgttgttgttgtcattgttttgctttgttgtttttactctgaactgaactgtatcttgacagcacttttgaattaagagcattactcttattgttctctactacctggacgccacctccctgttgccatagtgttaaggatcatgctccgaggtggggtgaggcagaatggggccaagatcagaaagttacattaagctacatcaggtttatacaagcataaaaccaaatttttggagcagtccccagaatacaacctggtttagccacacctaaaggttgctcttgaatattccttgagaatccacatccctagaatgctgggtttcaatgggccctttatgtacctatcatggtgtcatttctgagcatttctaaatattccttcatgtcttactgacagtttttcttgaataaatcttaggaatattagtgccattatcagtattttgtttggtctgttcacaccacaaataactacccaggtctgctacttgcccctatttctctacctgctaatgaaaatgcttttgaaagtttgagtaacagtattggagtgtgcacagtggtattggtaggttctgtactcatccttaaccacttgttttcatcctttgtgagcttgaagtttctccaaaaaatttatcacaaaacttatcagacatagttaatacactcagagagagaatcactgaaaaagtagatgtagtttaacaaacccagtgccttttttttacccatgaatacatatttgtcaactaaacctcattttgcaacttgttccactactcgaatggtaacaaacttttggtttcccaatagatttggaagatgttgcttttgaaagtaggaaatagatggctttagaagatggaagaatattttgtttgaagtgggagcgtggtatgtccttagctgtctgtgaaatgcagctgaagatgggtgtgggccttcatctgcatttcccatcttcagtttgaggaggtagttacccttctaaccacttaagaactgcatggtacatgctgttttatttacagggcaaaactgtgctcccgtagtttccctggtgcttgccttcacgttaacacagtgtcatcgtttggcagtgtttatgtgccagggtccatgttagaaggaggaaaggtatagcgaagttaaagggtgcagttggcctcccacctttagttttgtaagtgcctttaaagtttgatttttgtaggttgatcataaggaagtgataagtatgttaggttatttgtggtttgagctaattttagtctctttttacagcttgctttgtatcctttgccattaaaacatgctttctagaaagacaacttttgaatgtaggacacagtctatattctatacttggctacatttcaaaaaatattttctcagtactttggaagttggacagttggaagcatagtgacagtatttaaaaatctttgattccggccgggcatggtggctcacgcctgtaatcccagcactttgggaggccgaggtgggtggatcacttgaggtccggagttcaggaccagcctgaccaacatggtgaaaccctgtctctactaaaaatacaaaattagccgagcgtggtggtacatgcctgtaatcccagctactcaggaggctgaggcaggagaatcgcttgaatctgggaggcggaggttgcattgagccgagatcataccattgcactacagcctgggggacaagagtgaaactctgtctcaaaaaaaaaaaaaaaattaagtgatttctttgctttgtgacacttctacttttccagcaagtaaattatattctttcatacaggtatgaaattcttgttccaagctagtggttaaaaaggcacagttgatattagaggatttgtaaaagattatgaccacgcctgcaatgtactgaagcaaggctttgctgggctgtgtataggaaaccttccccagcctgtgcccttgcttgatagaacattttgctcctaagggtaggtgcctgtatctgtctccagtactggttagtttcacacagaacagttgtgtttcagagctttagtctcaagctgccctgctcccctgaagcagccaccctgagcatgtgcactcacaggaggggacatgtgaggtcatggaagaagacgactcaggaagaagaagacttgggtttgggttctgactctgcctttgactgttgtgggattttgaggagttgcatacaggatctgtaaaatgtagtcattagactagactagacagccatatagcattacctagatgtaactttctacaaagacatggtcacaggagaagaccagagggtggggtgatctttctggaaaaattggggcttcatgccttactcatgctagatatggtagcattatatggctgtgcctgatccccctaatctaaaagtgggacagaactttaaaatttcatattaactcaaattaaaacttgaaaaaaacccattatttccttaaaaataataaaatgccctgtgggggcataagtcacattatattttaaaattcctgaatgccacatggatgaatgtagttccttttgaaattcttcttttgtctaaagaggaatgttggattttgtaattggactaaaaaatcttccatttgagagagaaacagtctgctgcatgttctacccttgttcaggataaaacccactaatagctaacatttattgaattctgtgttgtgcctcaggcactgtgcaaagtcctttacatgcaatgctgtttattatatactgtcaattggtctataacagcaggaaatgtttcaggaggacaatgaggtcccagaccctcagtcttctcctgtgtcctggattcagcttcacaatagcactatggcagtgtggccactgcttcagcttccacatacatggctgtgaagagagacaggggattgtgctaagcctccccgatttattaggacataggaggagagagtttgtagtttttgacctttgcctagttttctaacctctttcctagatgtcacaaattggccacccacagtcatattttgcttgcttcacgcaatgctttttaaaaaagagaagagtttaatttgtgccattgtttataaatgaatcaggagaaatgacatgcaactctggattctggcctctcttgaaaaatctgaaaatcacaccgtctgagcttacactggcagtggtctgctggactgagggacacaactccttttggatgtacatgtgtgcgttgcagagtttaccacagtcccacagtgggtcacactgtccttgtcggtgtacactacctagcacttgagtttgcaacccctaccccaagctgagttttctcgtcaagcttgatgttaatgttatgtgatgcttggccttgtaggtatttggtatattatcgttagataaaattgaagcaaagggctaaagggttggtggcctgagggagtgcccttgacagtaaagtctaggataaaatcattggccaggtactccttcccttcccgcccttcctcttttctctttatcctcagcctccttctgctattttgaggaagttagaagccaccaccattttttcccacctcaggcaactgagtgtggctgtatttctgtcccatgttcagttatttccaggaactatttttgatgaccaacttgaagttacattgggtgggcctaatgggggctgataaaagaatgaggtgaccaaatatgcttgcactgagacggctacgaagtaaggtttttaatgacttgctttgtgacttggtcaggagtgataccatttgtcatgtgtccaacttcatgactaaatggttgctctaccttatcctcatagctataataaaataaaataaatacatacattgcagggaggaatgtatcttgttaaaggtctctcccttttagcaacaaaagtacatattatgttgtagaacatgctttttctttgatccttcttgaacacctattactctatagaggtatgttgtgtatggcaaattagaacaagcaatagataaggatgattctttaccattataacccagtcaaggtctttgtcctaagttttgtacctttctccagagggaaaggtatttgtatttatttatttatttttgaggcagagttttgctcttgttgcccaggctggggtgcaatggcacgatctcagctcactgtaacatccgcctcccgagttcaagtgattctcctgcctcagcctcccgagtagctgggattacaggtgcctgccacgatgcccggctaatttttttttttttttttgtatttttagtagagatggggtttcatcatgttggccaggctggtcttgaactcctgacctcaggtgatccatccacctcggcctcccaaagtgttgggattacaggcatcagccactgcctccggccaggtatttgtatttttagtctctatgccttaccgtctcagatcaggaggatttggtgatttatcgaatgtgggggaaggggaagaagaggaaacgggaggaatgttccagattagggaaatagctagatggaagatgcagcccctcatcaaggtggggacacaggaaaaggaacgtgtgcaaagaagatggtgatctggttgtgaccatgttgttagaggacgtccagggaagcatctggtaggtggtggggtgtttaaatatagaacattcggagaatgctccgaagcttcagagaacccttcccaaaaggacaaaaccagctcagtgttttagcactccgggatcatatggcatgacagcatggctgctttatacttttttgtgtatgtgaaattaaaaccaaccactcaggaccaatttctctgaagctttttgtcaatctttcatttgcttttctcgtctagattgtaagctccttgcagccagtgtctgttgattcagtcattcaaaaaataatacatgaacagctactaggtaccaggctctgtgctgggcagttgggatatgtggtgaggaagacaaacttggtccctgcccttaggaagttcagtagtccagcagacaaagtggctgaataaagataatctcagttcacagtgataagagctcttacaggcctaggctccaggtgctgtggggatgctcaggaaaaggtatctaattgggattgggagcaggcaaaacaaataaaggatagtgtataaaggtaatatctagttgaagttctgaagggcaaggaggagtgagcctgtatattctctgagtctctccctaatctgggattgacttcttgtccgtctctgttcatattaagtgtcacctaggcttgaaagggtgagatcatatttcacttccttcctctttggtcttaacctttctctgctaccccctcacacaatgcatatgcattattctcttattgtatatatttttcctctcttccttttcatgtttcctctgccattacttttaacctcgactgccatatggcctctaaacgcttccagaagggtagcctagtggaggttattccatcatggccttgagctcatgcgaccagatagtgaaggcatctgtgtaggtgtcttctccaggagggtgatatttgtttcattgtaaattttgtagccctagaacaccaacaacagtgcacagtaattagtaggcaggcagtacaggattcattgaagtgaagtgataacttttatccaagtatgtatgcagataatctttgatttgtacaaaaaaaattatattttaatatgtaaagattttttaaaagaatcttcaagttttagccttcccactaggaatatattgaaaacatgtgcctagttcactgacttgcagctgccactatgagaataaaggtctcatttagttgttgtgaattttaagggatattttcaatgatgttggctggtttatcccattatgtggtctttttttttttttttttttttttttgaggtggagtctcgctctgtcacccaggctggagtgcagtggcgcaatctcgactcactgcaacctccgcctcccgggttcaagcgattctgctgtctcagcctcctaagtagctgggattacaggcgcctgccactacgcccagctaatttttggtatttttggtagagaagggtttcaccatgttggtcaggctggtctcgaactcctgacctcatgatccactcacttcagcctcccaaagtgctgggattacaggcgtgagccaccatgcccagcctatgtgctcttattagcaattctcagtacacagatagctttgagtgattctttcaagtcaagtaccttattaaaaaactcaagtgtactgataattatcttacttttaaatggctaagtgataagactgaatttttaggtactgtaacacttcagattacagattctgatatttttatggttatttatatttatttatttttgagatggagttttgctcttgctgcctaggctggagtgcaatggcacgatctcggctcactgcaacctccgcctcccaggttcaagcgattctcctgcctcagcctcctgagtagctgggattacagtcacccgccactacagccggctaatttttgttatttttaatagagacaatgtttcaccatgttggccagggtggtctcgcacttctgacctctggcgatccgcccgcctcggcctcccaaagtgctgggattacaggcgtgagccaccgcacctggcctggttacttaaatttaaatacaaaaattatgttgattaattctgaatgatttcctgattgctccccgtttaccattcacacatttattaaattcttcgcttgccatatagaagcagtctctctgccatatatgccatatagataacagaactagctgtctgcaaaccactgaaattgtgaaaacatctccccttttttcctgtttctaattctagctatgaggattatatacagaagtagtcctggatttgatttttttttttttttgatgattgttttttgatagttgttgactacaaatcatttaaacgtctgaaaggggaaaggttttccttaaaaatggatgacaaaggagaataaaaaggtattttgactatttttttgaatgatgagttttttttttctctttcttgttttcttttggagtcatttatgtgtcactgagtggataccatggaacatgtggcagaagtagatatatggggtaaaagaaccatagttcataagctccttgacagaatcactgaagtgtagccgttatatggccactgtcgcagggggaggcagcagttttgaagaaggggatgagtaataatgagtgataaaaaggcatcctggatagaagaccaaactctgcagaagaccccagtttgattatgcttttgttttctgatttgcggaggagagtgaaaatgcctgaggggtgcgggggagcacatagggtgtatgtgtgtgtgtgtgcgcgtgcagattctctctttcactgtatgtatttgtatgcatgtatgtatcttaggacttaagctttctagtcaataaattgccatagtggggaattgcttaattgcttgccttctgttgttgtatttaatttaattttatttttaatgatttttttggtggggtacagggtcttaactatgttgtccaggctggtcttgaactcctaaactcaagtgatcctcccgcctcgggctcccaaaatgctgggattacaggtgtgagccaccatgcccagcttagttgtattttaaatgggcctgtttgcagcattccctactccccttagtttacctggctcacaacctgtctttccatatcaaggcttctgtcacccctggcccatgtcagtgcatttgggcagcccacccagcatcatcacctcatgtcccagggaacttcctgttcctctcttccagctatttccttccctggcagttgagatagtctctacctttgacctactgttaagctcagaccttctgctctctagttacagcctctgtgctgccagattccctcgctcagttgctttctctagtttgggttttctcctttattcagatttccagctgtttctctcctccccccaccgcagcctcctcacttccctccttatgcatctgagactgtggtcagtcactttagatgctgcctctccactgtacttgtgtccatcttcttacctaccacctctagccctggagcaggctcttcccctgtctttgtcttcctgggcccaggctcctaagcgctgctggaaaaaaaatcccccagtattgagcccctagaaatccagtctttaatcccaaatctgtctcccccagcatctggccatcagatctaaagcttacctgccatcctttccacctcatttctctcacaggggaaaaggagcctttgctcctagagtctgcgctcctgaccccttcccatctcacctgttcaaggcatcttgcaataaggggttggtgactctcgaggaatggatcccaggccctccctattatcatcttatgtatgccagttcaacgttctcagcttcctccagccgagacggcccctccagccactgctttatactctccttctctggttgaaatttttgaagtaaataggtcactctgcccatcgttcatcttccagtcactctgtgtgtttatcttccagggaagtgaggctctatgctaccaagccactgaaataatttttttttttttccagactgagtcttgctctgtcacccaggctggagtgcagtgccgcagtcttggctcactgcaacctctgcctcccggcttcaggcgattctcctgccccagcctcctgagtagctgggattacaggtgcctgtcatcacgcctggctaattttttgtatttttggtagagatggggcttcaccatgttggccaggcttgttggcatgttgaccatgttggccaggctagcctcaagtgatccacccgtcagcctcccaaagtgctgagattacaggtgtgagccaccgcacctggcctgaaataattcttgacaagatctgcttccttgttactaatacagtggatattttgcatcctaattttaatgcagttcagtgtggtagacctgtatttgcatattgaatattcccttccctgttttaataactctattttttccttttcttttatatctcctgcttctctagctagtcctagaccttactcatcggtgtcttctctgtttgttcctcaacttgaggagttcctacagggtttacccaatctgctgctttcatttagcccttttgttctttttgagccatctcattcactcacccaggatgtagcatcggcccttgaattcagtgtgcacacatacactgtgcactatgggacagccttcagaggcactttgttcctgaaattgtggtggtctttgcctctcatggagccttgcatatgctgtttcctctgcctggaatatcctaccttttacttaactgattctcgttcttctttccagtcacattttgtacatttcttctgggaagctttctctgatttcccctttccacaggtccaagttaactgccttgtctaggtcctcccatggccctctgaaggcctcctttcatagcaccatgtctgagtatactgtaataacacgcattgctctgtaatagcctgtttacttacctattgccaagtaatctatcaagtcttataaagggcggggctgcttttgttctagtcatttgtatctcttagtacccaatatagtgtttggcatatagaaaatacccaacaaggccagtcgcagtggctcatacctgtaatccgagcactttggtaggctgaggtgggcggatcacttgaggtcaggagtttgagaccagcctggccaacatggtgaaaccctgtctctactaaaaatacaaaaattagccaggcgtggtggcgggtgcctgtagtcccagctacttgggaggctgaggcaggagaatcacttgaactggggaggtggaggttgcagtgagctgagatcactccactgcactccagcctgggtgacagagtgagactccatcttaaaaaaaaaaaagactccatcttaaaaaaaaaaaaaaagaaaaaagaaagaaaatacccaataagtagttcctgaatgaatagatgagaatgctgtttagaaggttcatgaattggaaaccgtgattgctagggaggctttgagttgatggtattgtgttgaaccatgtgttacccaggatcaatttagattttacactttgttttctctgttcctttttatagtaattttctgtatgtggtgttttccccccatgagattgtataccatttctcagcgagaactgtgtgtaatgcttggtggctccctcatggtgccttgcatggaattggacttcgtttcagtggatctgatcccagttatgttaatgctcgatggagctaagtcttatctcgaagcagtccatgtcttcatcagctggccctgcctccatgccctgcacagaccatgccactctggagaggtagtttccctgtggcttattagtcttatgttccagtgtgctggccaagtatgagagacatcagtggtatgagagagtctctctcattcaaacttcgtaggttttgtagctgggactgaccagtgctgacaggaaatagaggcatttattaaaagccagagatttttcaagttgcaggaagcaaagctcttgttagctatgattttgtggtgggtttggtagtccaatataaaagtaaaaactggatgacaatgggaggagcatgcttgggtctccaaagttagatcatttttcctaagtaatttgtctttaaacttttactggtttggaatttcctgagattttgatcttgccagaaagtttatagcaaaagttctgagcagatgacacttttgcgtctgaaaccaaatcattgtttttgtttttaacttttttcttaatatattatccttagttcagccctgaagattattctgttatttgtggatctcaactttccccccatctcctggatctttgtgaaatgaatggtattaattgaatagagaaggaagatataaacataaacttagtcaaaaacttgttcttgactaggcaagttgggctttatagctttgagctgatgacatgtctattcttgtgaaaaagggatttttagtgttggtttggcttcttgttatatttgatttattattattatcattatcattatttttgagacagagtcttgctctgtcgcccaggctggagtgcagtggctcaatctcggctcagtgcaacctccgcctcccaggttcaagcgattctcgtgcctcagcctctggagtagctgggattacaggcgggtgccactacacctggctaatatttgtatttttagtagagacaggtttcaccatgttggctaggctggtcttgaactcctgacctcaggtgatccacctgccttggcctcccaaagtgctgggattacaggccttagccactgtgcctggctgattttttttttttttttttttttaggtttgttttaactggaactttacgtgaatgtaattgaatttagaataaaagcacttaatttcacagtgtgcagtgaactttctgttacttattttaacagtaaaaccccttgcagtaaatgacttggagcaaagattgcttttttaaaaaatgttttaatttgtttttcttttcttgagatggagtcttgctctgtcaccaggctggagtatggtggcgcgatcttggctcactgcagcctccccgcctcctaggttcaagcgaatctcctgcctcagcctcctgagtagctgggactacaggcacatgccaccatgcccagctaatttttgtatttttagtagagacagggtttcaccatgttggtcaggatggtcttgatctcttgaccccgtgatccaccctcctcggcctcccaaagtgctgggattacaactgctgggattacaagtgctgggattacaagcgtgagccaccacgcctggccaattttttttttttttttctttttgagacagagtttcactctgtcacccaggctggagtgcagtgtcacagtcaaaactcactggcagccttaacctcctgggctcgaatgatcctcctgcctcagcctcccaagtaactgagactacaggcatgtaccactgtgcccagctaattgtttttttattttttattttttgtagggacagggtctcgctattttgcccaggctagtctacaactcttgggctcaagcagtcctcctgccttgacctcccaaaatgttgggattacagggacaagccactgcacctggccaaggattgttttttaagtgaactgagacccagccttattagtggtcccagagcagacctgggacctgaagggaacccttttcttctggtccagcgtctttcctctgatgggctactttcctggagcctttgattgcctgtcatcagagtaactgagtttgaacagagtaggtagttcctctccagaccaccacactcaccagctttcattctgcttctctcgtttagactgtggttctgaatcctcagttctatttactgagtgtttttaaacataaaaatgccttttaatgagattgaaggccagaggtgggacagttgaggacaaagtagaaataaaaccttcaaggcggggttgttggtgggagtctttttttgtttgtttgttttttgagactgagtctcgctctgtcacccaggctggagtgcagtggcacaatctcagctcactgcaacctccgcctcccgagttcaagctattctcctgcctcagcctccttagtagctgggatttcaggctcccgccaccatgcccagctaatttttgtatttttggtagaaacggggtttcaccatgttggccaggctggtctcaaactcctgacctcaggtgatctgtctgcctcagcctcccaaagtgctgggattacaggcgtgagccactgtgcctggcagggagtcttatagaagctgtcgtggacaatgtgggaagtagtgagcctttgtattccagtatgctgggctccactgtgcttgctctggcccccggtcgctctctgtgtgttattgagtccccatccacggccatactcttcgtcctgcttctctccttaccatcctctccccgctagtggtaccacggctaccactagcaattactgacatgtgggatcttagggctacttccctataaggctgcagggcatgtggtgttggctacgcgcatggtaaccatggtagccctgtggttctccacatgtgcgccttgtgacctgggattggctgcagactagtaataaactgcgtcttctggtatggaatctgtctgtagttgtactttctacctctgtatttaaggggagatctgtaacctaccaatgccagttgaagaggatggatgatagagatgttaacaaacagctgaaaaactaactacaatggcctgcaaaatagaacagcaggtttttgtggcaaaactttgtgtccatgagtttgttttttaaatatcctcatataatctgttttaaatcgagaggctttgggtaaaagccatggctagtcttacatgtcatggagtacctagcttgtgaggttcacagtttattatttacagagtgtccccttaaatcttctttgggtcggttcagcgaatgttgctcagatggacttttttggctgacatagagtcaaaatggtaatcaagcatgaaagtacagacagtccttaacgcacaaatgtgtcatgcttgaaaagttggaaagttggttctctggagctctgattgtattgtcctgtagaatccgtgttgtgaatggtggttaaatcccaaatgagtccgtagaacctatataatctgcaatatacctgcagtattccaattaatatgtaattcccccatagaactatgttaatgatttgtatgtatggtatttaatattatacataataatgattgtatgaataaaaaacattctgggctccatgtggatgatggggtgtgtgtgtgtgtctgtctatgtgtgggtgggtgtgtgttcatagatcccttttcctgcaatcctggcactggaattggttttatcatttccaattaagtttcattcccatgaattttggagtacagactgggtccaggtatgcagggcatagattagagccctgagaaataggattaggctggaattgctgggttggagatcagtagcttccaggaacactttttgggcctggctgtcttcattatccccttttgttttctcctggggtctgcaggtattgccctgttttgttcctctaatatcactttttttttttttctgcttttgaccagggtttttgcctctggtctacaactgaatatcctatcagactctcctgattttgaaataaatatatagtttttttgaggtgttctagcgaatttctaaatctaaatgttgtggcagagttattacatactaattttgctatgagaggttgtagaatcccagatgactaatcttgtaaaccatacacgcatttccatctaattctccattgtatatcatgttgcagaaaataacagcctctagagtttacattgcctcctttgactatatttcttatttaagattagttttcagataagaccttttcatggcagtacataactgtacagagggcttccaacttgtcttgggagctctcatctctgggagacatcacattacccactgccccctgccccccgcccccagcctggatgcactcagcctgtaccccatttctgtcctcagccaaacactgctgaaatgcaagagctttcaattgctagccagtgaagatgcagactaagggatttccatgtagaagcccgctcttttcagctggctcgtcgagagctggaggccccttgcttgttcacatgaggctttttgtccctgacttggtggctgctgtttcacttctcagcagaaagggacacccttgcccccccccagaaaggaagatttgatgtaccacttccgaaaggttcagtcgggcatcactgtaaccaagaagataggtcaggtgaggctggaggtggaacagggctgctcgctagaactccagattgttccacaagtgccttctggcagagaatgatggaagcttccgtgatttttttttctccttaatagttatgagcacagaagaggagcagattgtctggctatagaagctgtcttattttttatttttgtttttgagatggagtctttctctcttgcccaggctaaagtgcaatggcgcgatctcggctcactgcaacctccgcctcccgagttcaagcgattctcctgcctcagcctcctgagtagctgggaattacaggcatgcgccaccatgccagactgatttttgtattagagacagggtttcaccatgttggtcagtctggtttcgaactcctgacctcaagatctgcccacctcagcctcccaaagtgttgggattacaggtgttagccactgcacccggccgaagctgtcatattaaatagcactttctgcttttagcaaatttaatccaaatgagactttagattttcttgctctgacttaccagcagttccttgaaacacatttaattatttttgccagaaaatcactcaagcacttacgccatttttttaccgtgaaaatatgctgcattattttaaaatatattagaagtcagtaaccataagattttatatgttttctaatgtattctgtaagctttctgctgcttttgtttggaaggtgtattttgtaacgtagaggactgctttatctgcttgtaagcttgatttttgtttttactgtaatttttttttcttttgctgtattgagaaatacattgagtaattataaagtcagtggcatgtttataagttaatatttgtatctattccttagttactctaactcaaaacctaaagtaatcttcaactctaatttactctgacatccagttgactgccaagtcctccaacttaatccttatccttttttttttaaagagatgcagtcttgctttgtcacccaggctggagtgcagtggtgcaatcatagcttactgtaacctcaaattcctgggctcaaatgatcctcccacgtcagcctctggagtagctggggctacaggctcttgctaccatgcccagctaactttttatttttattttttatagagacagagtctcactgttgctcaggctggccttgaactcctgccttcaggcggaactcctgccttcaggcggtcctcctgcattggcctcccaaagtgctggaattacaggcccaattttattcttgggatgtatgtctgaaactctttccttcacttccttcccaagccttagttcaggcccttctcatctgtggtcttcaaagtcgccttcagctggttcaggtccttcctttctgctgtatctttcatgggaggacatgttatgtatcactgtcctacttgaaaacttccattccccattgatgagggtgttacctccagattcctaacacaggtgctgaaggcatgcctggataaaggcactcccttgatctcctggccaggtccccgtacacctgcagcgcatgctccacattctgtctttactgatgctgtgtcttctgcctgcggagccacccaccattctattcacagcccctgcctcagcggagcacgtgcctccctcttcctacactgagctgtcctttctattgaatcccctcttttttgtagtatgggaaatattttattatgaatactcttttctctgttgcctccgtgaccacgttaactttgccctaattcgccttaggactccatctgcttaggggaaagttaggatttggttacagaaagcaagctgctagaaagaacagtgtttagcttctgacaggcaaaataggattttgcaacatgcttttcctttttaatgcttagacattttatatgaattaatatttttatttggttgcttatacattactttctttttagctagaatgtgaaccctataggaacatggggattgcctttcacatctttgtatcctcagtacctaatgttcagtcaccctgtggtcttgtgtcgtatatacatttagccttccttaattaaaccatatgtactggtccccgtcccccacccccaaatagagagaaagaaattccttgaatactacattgccagtatcaaaccacaccttgatatcctctggggaaagggaggtatcagttgaaaagagaaaagaggttaaaatctaggcattaaaatgtgtaaggcttagatgctggcaatttaaggtatgttttcctgaggttaattttgattgtgtgcaaattttacctcatatctaactgtaggatttagtcaccacataagatgggatacctccataaatccttcagaaatgtttgtgaaattaaataaagccttattgaagactcagctcttgagagtcatctacctacctaacagttattcttgaacagaagagtcttacttttccctataaggcagtgtgatagccatctgtatattcatataatttatgttggcgcttacttcatttaaaaatgtattccgtgaatgcagttgccaggcggtgtgctgatcagaaacgtgtaccaatggcctcttttataattataagaggaagaccaacctgaaacagtcacacaaatgattaattttaattgtggaggagtgctgggaaagaaaaataaaagatgcaatgcaagtgtttacaaaggagctttgagcttgtttgaagtggtccttgggcacttaagcaaggcttaaagaatgatgtgattagaagtggcttagcaattctaaagaacacagggaaggcgtgtggccagaacattggtccctagagcacatcgcctcctgacataccatttccttaagttaatgttttaccactatacataggccctcccctttgtttacccagatttttttaattttaaggatgtttttaataacttagaatcctgtaatttgttgaacagtcctgtattccctttacttatattccttgagattttataaaatattttttacatgtcccaagtcttgattatatctttttacctcttgttaagaaatacttacttttctatttttatgctatatttcatgtttactgtagaaaacaaaaaaagtaaaatttttctttattcctatcactgcagcttataagcactctaaacattttgatctatattttgccaatcatatattttagttaaaattgttgttgacataattgtagattcctgtgcagttgaaagaaataatacagagctgagcgcggtggctcacgcctgtaatcccagcactttgggaggccgaggcaggcagatcatgaggtcaggagtttgagaccagactggccaacatggcgaaaccctgtctctactaaaaatacaaaaattagctgggtgtggtggcgggcacctgtaatcccagctagttgggaggctgaggcaggagaatcgtttgaactccggaggcagaggttgcagtgagccgagatggtaccattccactccagcctgggcaacaagagcaagactgcatctcaaaaataataataataataataaataaactttaaaaataaaacagagagatcccatgtgcgctttgcctagttcccccatccactgcccataacattttgcagaactgcagtacagtatcacaaccacaatactgacattgatacagtctgctcatcttattcatatttccccagtgttactcgtatccacgtgtgtatgcattgtgttttcaatactcttttattataaagctgtttttaatgtgattcaattctaggttgttttgttctgccctcaaaaagcattccctctcctaatcatatctccgtcatacccttgtatgttttctttaaacctgttttaagaaagcagctacctgtaagagaaatgagattgaaaacagaattgccaatctgcttgtactttataagcctgttgattgtttagatacggtttagccagtttatagttaccctgggtgctgaaaggtatgctggatgatacctaaccaacagagaaccattgaatgccgttcaaaatggactgaagcatcagcaatgtctgaaaaaggcctgacagtaatgtacatgtcaaatggcccgtaatttaagcagagtagagtaagtagaagaataaacatggggaaagttccagcaacagaggaggctttgagcttttgctcttcatcttgagtggatgttgttctcaggtggtaataggccatcgagctttctccactggctgcctctctggggaacaaataaccgaaaagatactcagcaccctggttggtacataggtggtcagttgatttatacttcctggttttcagtgttgcttgaattttctaaatggaaacacagtacctttataatcagaaaacaatcccgagttttgatttgagggtgttgtaaaaagttaaaaaaaaaaaaacagaaatgtgaaaaggaagttgtgttagagtatttggagttgagaaagcatgaaaaggacagaagagaagctggttgtcaggttgcatggggtagctacaagcacactgaccagaaagtcagctggaaaaaaaatgtagaaacaggagataaaacggccaaggggctatacaagcaaacagcaaggacctgagaagaaaaactagttaggtgtgactgtcagagtgatgtgtacagtgtgatcctttctgtgtaaaaacaagcagtaagaattcgctgtttacgtttgcgtgtgtttggagaagagtggggaagagtaggcactgccagactgtgaacactggttaggttattgttatatctttgtattatatacactggacatgttatttgtataatatgagaagaaattttataaatcattaaatcttttggcatttaggaacatttgtgttttctaatagttgcttctatactattatctttattatatgcccttcatcttctcagtgtttggctgttgttgtgattcccttttgtgagcagtgttgaagttagctaatattcatttcttctcccttctttcaccctcctccagagtctgatttgaagtattcctagctgctacctataaaagcaataagcaagattgttttacttttcacaaactcgtcctgttctgtgcctctgcctcggacatagctgtagtatagagtgttgtctcccttacatccttctatcttagacctactagtaaatattaatgctcactctaagttcttctcaattcttttttttttttttttttttttttttgagaaagagtttcgctcttgttgcccaggctggagtgcaacggcacgatttcggctcaccgcaacctccaccttctgggtttaagcgactctcctgcctcagcctcctgagtagctgggattacagtcacgtgccaccacccctggcaaattttgtatttttagtagagacaaggtttcttccatgttggccaggctggtctcaaactcccgacctcaggtgatccacctgcctcagccttccaaagtgctgggattccaggcgtgagccaccgcgcccagcctcttctctcaattcttcctgaagctctttctgcactagattcctcaggaagggcttgtgggaacaatcttctgtgaatcaacagtacatattcataatagtttgtcagcagcctattattttaaggccatttggtctgtatataaaaatgtttggatcacattttctttctttaaggtaaatatgttattctgttgtcttctggtataaagcattgctgtaaatgtttgacagtctaattatcttttgcttataagtgacttagggttttttgtctatgtgcccaaaggattttttccctctttctctctttttttttttttttttttttttttaaacagacaggatctcaccctgttgcccaggctttagtgcagtgaggcagtcagagcttactgaagttttgaactcctgggcttgaggaacaaaggatttttttaaccttttaattcaaagtctcatcatttatgcaaccatgtcttggtgttggctgttttgggttgttctccctcaaaaatccatgtgctctttcaatatgtagttttaaatcttttttttttaatttcaggaaaatcttgaattagagttttccgtttttcgtctggtacattgcttgggtttccttcttcaggaactcagcctgttatgtgtatgtttgatcttctttgcctgtcgtctgtttctttcacttcctctcacttttttaaacttcatttattaaaaaaaaatttttttttcgagacagagtttcgctcttgttgcccaggctggagtgcaatggcgtgatctcggctcactgcaacctccgcctcccaggttcaagtgattctcctgcctcagtctcccaagtagctgggattacaggcatgcgccaccacgcccagctaattttttgtatttttagtagagacagggtttctccatgttggtcaggctggtcttgaactcctgacctcgtgatctgcccgcctcagcctcccaaagtgctgggattacaggcgtgagccactgtgcccagccttattaaaaattttaaaaacatacatttaaacttaacagaaaaattatgagagagaagggggtggtgccaggcttttttaaacaaccagctcttacatgaactcatagagtgataactcattaccatgaggacggcatcaagccgttcatgaaggatctggccccgtgacccagacacctcctactaggtccatttttaacattggggatcacatttcaacgtgagatttggagggggcaaaactacaaaccatgtcactcagggattggaggagcaagtaccacctatactttggactcaggtagaaaggcaaaatatccaggaaataagctgctaccgtccagggttcagcagaggtgcccatcagcctgccaagtactcaagagtccagcctctagggagctaatcatcatggtgagctcttcgaggcacagggagctgggaagacagtgcttgccacccctgcctgaatagtgtttgcacagagagttctgttgtgtcttgattgggtcctcctgccactgggaatgctgtggattatactaggtctctatctggcttgtttcagggctccatgtgaaaaccttcttgatatcctagccatccacctgctcagtccctagtttgcaaggaggctgtggggagcctagattctgtgtcagatagaatgtactacattccgtctcaggaatgtaccacatcagaaaacagtgcgacctgcaggagaagtagaggtgaagaggcacattcttccgagaaatgtttctctcaacacccagcattccctggatatcagcaggaaattactcactgctagaaaatgccccatgagccttctgttaaggaggtcaagggagagaacagagaaagttctcaaagttgacttggtcactggtactttcttatgcggttcttattttgtttgccatcgtcatcatcatgctatgtctattttctcaatccaaatccactgctttcaccttggttctttctgaccggtttggcacactcattcagtaaatccttatggagagcccaatgtctgcataattgtgctgtgctgatgaccaagctagacctacgagtgtcggctcctttgagatgtacgggacagctcttctgtcatctcttctgggaagcctctccaggcttggtgaacagtggcaagatgtttaacagttgtacatgtgtcccatgttcctttctaagagcctgggcaaaccagacccggtcgcaggtcatcgtagtatggcgtgagcttcctctctcctttctgaccttttgtgtgatggcaagaacctgcagagtgacacaagcagcaggcttctgaggttgctctagcctcagaatggccgtcccttctccaccctggccctcattgctgaggtttcctttgaagcaacagtgccggaacagactaggggaagcagcttggacatagctgtatgatttattaccacccattgaggccaaccaaagtcggcaaggagaggtagcaggtcagtggtgcctggaagcttcctctttcctttgcaccagatgtgactgctctgcaattactcctaaatttgctactctcgtttttactagccaaccttgatgtttttcccttcttcctgtagaatagacttcccctctgatcagtactttctactcaacactatttgtggccacagtgggaactcattgaggacagggaccatgacattactacctgacccatcaacacttggcataacttgaaatgcaaggacaaaaattggctgcaagtacaatgtggtcttcactctgaaggtgatccttaaaacttggctttggcatcatattgccttaatatacctaggggattgggtaaaaccagttactttaaaagagttttacaattctggccttctagctatcttgtcttcttaaacaagagcacaagatgaatgtatcttagtgaaattttatatggtttgctttgagtaatcttgcgaagattgatttttagcacagtaggaaagacacattctaatagtgatttttttccccgagtttatgtactgctgttgcatgaaaatctgactagatttaatgttcctaaagttctttgttcatcctgatttttgcaggtcctagggaaagctttgttttcctcttaacctaacttagatgttgtcatttcatgagctttggaggaagagtgtatagccaattgtgtaatgtctttaaaggatattatctctgcaatagttgtttataaggcctaagttattcatgtaataatagtggccccggatctgtttctagcaataggtatatggattttggttcctatatagttgtagttgtggctttgagatattgagcaagcccttttaagaaaggatttggcatccctcagccttcaaaagcttctcaaaattgatcatatgttattagcaaaggtttactgcctgcttccattgtatagacaatttattttttatgtattccgttctaagaaggcagatgaccaaaagatcttgcatctgttgcccaaggcttgtgactagagaggaaagagataagaatacttttttaaaatcccattttactaaatatgttgaggaagtggtaagatatattaatttgttgagatttttctgttatgcctattatatgaaataggtactctgaacatggcttcttaattaaatatatttgataaaatacaacttgcttcccctggagtttagaagtcagataactgccatggagagctatgctttctttgttttaaagatctgcttatgaacatgataaacaggaacaatttaatgttttcaatattttcttgtattttactgcaagtttatacacaacataaatatgggggaagggggaaatgtttataccagagccatcctgcccattctttccttacagaaggacaaaggagcagtatttattttaactacaaaaatactattgtaggttttaaaaattccgtatattttgatatcttgtgttcctcttgacctttaatttgctaaatagttgcaaagaatgaaggtaacctgcatcatcttcttaaaaaccaactctatctaattataatagtttgtctatctctgaaaaatagtgatgtgttcattctgaaatcagaactaccggatgcagctgcattttgttactatttgaatttcgggagagggaggaggatgcagcctttcgagctgctgaaatacacaaacacaaagaagacaccaagcatagtagaactgtgttaagctgaccaagccagaagaagcacctattctcagcatagtatgagacgtaaaggcaatataatgggcatagttgaagatggtagaaggaaaatagactctgatggtttaatgttaaatgctttttttaaaaaagtggtattccaatatcgaagaagaagactttctacttttagaagcaataaaggaaattgcagaggaaagggtcaataggttggaatacataaaaattaaaaacttttaaactttttttttttgagacagagtctcactctgtcacccaggctggagtgcaatggtgcaatctcggctcgctacaacctccgcttcctgagttcaagcaattctcctgcctcagcctcccgagtagctgggattacaggcatgggccaccactcctggctaatatttgtatttttagtagagacagggtttcaccatgttgtccaggctgatctcaaactcctgacctcgtgatccgcctgcctcggcctcccaaagtgctgggattacaggcatgagccaccgcgcctggactaaattgtttcagtattaattttttttaaaacaagatcttactgttgcccaggctgaagtacagtggcccaatcatggctaactgcagccttgacttctgggcctcaagggatcctcccacctcagcgtcccgagtagctgggaccacagacatgtaccaccacacccagctacttgttttatttttatttttgtagagatgaggtttcaccatgttgcccaggctggtctcgaactcctgggcccaagcaatcctcctcccttggcctcccaaagtgctggtattacaggtgtaagccattgcgccctgcctgattttttaaatgtgcaaacagataagttggaaaagtgatttccaataaagataaagagttgatggttttaaaatacgtaaagagcttatatgaatgagaaaaacactaacattccaaaagattagaaggcaaaggacagaaagaaacaaatcactatgtctgggaagggacatgaaggagcaggttcccactgggccagcggggctcaaacccactggggacgtccgagagactgcaagggccatgccttcacattgccgtacctgagaagcaaggagctggggtatttatctctttcacactttgggaggctgaggtgggcggatcacctgaggtcaggagttcgagactagcctggccaacacagtgaaaccccgtctctactaaaactagaaataattagctgggtgtggtggcacacacctgtaatcccagctacttggaaggctgaggcatgagaattgcttgagcccaggaggtagaggctgcagtgagcataaattgcaccactgcactccagcctgggtgaaactctgtctcaaaaagtaataataatcatgataaataaaataacattagattgttagcagaagtagccacaggtttctcccacctctctgcaagttgctgagtgtgattcccatcaagaggtacaatgtctttttatttttattttatttattttatttatattgcctatgttgtctaggctggttccaaactcctgagctcaagtgatccttctacgtcagccccccaaagtgttgggattacaggcatcagccactgcacctggcccagatactttttcttgagtaggaatttcgagtcaccctgaacattgcatgccttcgtagtggggaagacaataggaaaccacaggctgtaggctaaaatgggttgtgtttcttgtaacgtcatgacaaggcataacccatcttggcatagtaaatagtaagcactcactgaactgatgattttaaatctttgctgtttattcagcaatatcctaaattagcgctatgttagtggagttgcatctccctcatggattagtctgaaaaagatgagaaatctgtatgtagaccaagttatccttaaactgctcataatgtatgatgcacgtggttttacgtgtacagcctggtaccattgttcttaggcacatttcagtgccagaactcttaatacccaggaagaagcaaaaagaaagatggaggtgcagctagaggttgtggcctttgaacgattcattctgccttaataagagtggtctggctgagctcggtggctcacacctgtaatcccagcactttgggaggccaaggcaggcagatcgcttgagcccaggagttcaagaccagcccaggcagcatagcgagaccccccctccccccgtctctacaaaaaaatagaaacaatgagccaggcatggtggaacgtagtgcgtggtgcctgtagtctcagctacccagttggctgaggtgggaggatcacctgagccctagaagtcgaggcttcagtgagcccttattgtgccactgcactccactctaggtgacagagcgagacaggtcctgtctcgaaaagaaagaagaagaattaaaaaaagtgattagatcccttgtgtttgggacacttgttggcagcagggatggtagcgtttatgagggttgcatgtaacatcgcctagctcagacatctgtttgactgtcttcccccctgaagcgcaggctctgtgagggcaggtcttttgtctttcttgttaatcttcatatgcttagtgcttgccacatagttgatgctcagtcgatatttggatgaattgaagggattaatgcattgaatctgaaccttgctttcttaatgcatatggggagttctttggaaagccacacagaggagcttggttgcctgcttcctctcttccccagattgtctttttattgttgtggcttcactgaagcactctcacttcaaataattttgggcattggtcgtattttattctttgttccttcttcatccttacccctcagatggtatgtagaaaagtacactacatctagaaagtactttataaactcatttggttgataataatacatatgccttttccttggtcctggtagcagaatcttgtgccactcttggaatacaaacgaaattcttaaccaaagccagtttcattttgatgttctattttcctcccattcacactccaaattgtgcaccaaagtatcatcctagttttgtgaggatggttctccatacttcagggtaggagtatcatgtggattcctatgatacctttctccctgggaccatggagggcagcagctggtgattgatagtctgattcccggtgaggaaagctgtgagccttccacttgcagatgtctgccaactacatgtgtccttagtcaactgtaccactgtcctccggcaaacagcagaagcccagggcctgaagttcttaagctgtcattatggaaagcagaaggtaaacaaaacagaagtgaaagtagatttaattttttagactgttctcttacaggaatggttttgtggttctcagcattttaaaaaaaatagtggttccaatatgttttattgacatcaattactgtaagtctgattcattttctgcctattgatttctacccaaggtgaaattcatgacatttaacagaaagcataagtgattttttaaaagcagacactattagggacggtaaaaataagatttaaagtcgggacacttgaaaaagcaatttttatacctttggtaacgattctattctgattctttgtataaataatataaacaaaggctctagaagcttactataatgaagttggtgtgctgtttctaaattctggtttaaggcccaaattcattttatctgcattaacttttttttttttgagagtctcgctctgtcacccaggctagagtgcaatggtatgatctcggctcactgcaacctctgcctcccgggttcaagcgattctcctgcctcagcctcccgagtagctgggattataggtgtgcgccaccacgcccggctaatttttgtatttttagtagagacggggtttcactatgctggtcaggctggtctcaaactcctgaccttgtgatccgcctgcctcggcctcccaaagtgctgggattacaggcgtgagccactgcacccggccgtgttaaaatttttcagtggtagaccactatgtcaatatgttgctttcactgacaacagtattttcttaaagataggataccccatttctagatgaatctcattctagctggaaaataatttttcagttctgaaactacatcaggcctcagggaatcaaaactagctattagccacacacatataaagtggctttgctttataaacgatttagggtcaccatcaatgacaatggtccctttttattgtatttttaagagtttcttatcttaaatggctgcataactgtagagttttaaaaaaattaagtaaatgaccatgttaatgctctattaagcttccaaacaatattgtaatttactttgaagatttttttttattctcaacatcctgcagcttgaccgtttgcctccgtgtctcagtgctgcttattttgaggtgtggactggagtccatctgtcccccttgcctctgaactgctccgttttgtgtttcgtaattcttcatgctgcatcctgggcgcatttctctgtagtagctttcaatttgctcatgctttgactgggcttagtctagcgtttatcctatctcttaaggttttttaaaaaattttcatgattattcatttatttccaggatttctcatttcttcagtcacatctccttgttctggttttacttcttcctgtttttattcataacatcttttttatacacgattccttcatgtatttctaatcttaagtatatttaattgcttatttgattcttttttttttttattgagacagggtcttactctgccaccaggccggagtgcagtgacatagtcatagctcactgcagcctcaactacttggactcaagcgaccttcccacctcagcctcccaggtagctaggaatacaggtgtgagagccgccacacccagctgatttgtcttactatgttgcccaggctggtcttgaattcctgggctcatgtgatctgcccttcttggcctcctgaagtgctgagattataggtgtgaaccactgcacctggccaagtatgtttatttatttattctaatttgagagggagtctcgctctgtcgtgcccaggctgtagtgcagtggcacaatcccagctcactgcaacctctgcctcctgggttcatgcgattctcttgcctcagcctcctgagtacctggggttacagttgcgtgccaccacacctagctaatttttgtgtttttagtacaggcggggttttaccctgttggccaggctggtcttgaacttgtgacctgaagtgatccgcccgccttggcctcccaaagtgctgggattacaggcatgagccaccacgcttggcccaagtatgtttatttttaaagtccccaacaagctatacaataaattgcatatggaatggatttttgttctagttgatttgttggttatcatttgtagaactaactagttgtcttctgtgtttgataccttgcttctaggtcattttgagttgggagccttttgttttgtttttattctcatgctgtttttgagcctagctgtgcctttatggttttctctaaatttaattgaccattgttttatatttggagcagtgggtgtacatcagagtgtgaaagcagccccaccctctccaccagaaggtctccatgccagtttcacgaagcatttttcatgccctcattcctgcccttatcccttgatttgtggggagtttgtaaagcagttgattgttttttttccacgtagttttccaagtgcacataattgttctgttagtgacttgtagctccattatctattaaccttgccccagaccactgtacaagcggacccaacgcttcctccagctgtggcagggacagttacttggtatcctgctgccttttcaatgctgaccagttttgccccttcctcccctcaacccctgtctttcattcaactatcaccaaaccaaaagattctggtttgctttttagtatgtgttcttattcagtacatagtcattttaaaatttaaaccaaaacagacttggtactgattagcttaattttaagctttttctttattattaaacagtgtagtttatcttagcatttcatattaagtatatgatttatttcatattgcttatatgaatgtacacataaatataataaaaatattttcctaaggtttttgtagtaaattatatcgtttcattaactttcatatatagcattgcttttgacctggaagacattgaacctctgatgatttgtatattcctcggagtatactttgttacatagaaattttctcatttataatgagatttgtgattaacaaaatttgttcaacatgcattactttgaagatctggtttctaaaattttatgctagttaccccacccccccttctatatatatctccctattcagcgactactgcaagagttccaggaaatgtacactgtgtgttcacttactgcattttaaatcattgcctttactatatttctgcatttcccttcaatctagctctgtctgtacatttctgaaagccagtagcttccctgaagaaccaggtaacaacccgaacaatcaaattagataaccatttgtagaatggaggttccgggagatcttagaagatgtgatgggtgctaagggactttgtagttccctgaagttccagtgagtaaaaggtacccttggaattttttattccttcagacttttaaaacagagatcactttcaaaaattactctttctgctttgaatccatgttttagtaactattttgacactgtttggtcagaaggctgtgtgggtcaactgcaaataaataaaataaatgtgatttcagtaatttccattttgtaacaagtaattgagaaaataggattggatcagatatttgcttatacacattccctttcaggagcacttctgttctataaagaatgttggtatattgttaaggacacttcaagctttgggaacctttgaagtatccattgattcagttaacaaaattatgttgagtgcctaccctgggcctgggcctgtgttaggaggggacactaagatgagagtccaaagcacttcttctcagactcctggctgctaatgggttgctgcctctacttcttcacttagcagatagctttaaaatgagtaatgcattttaccatggagcccgtaagagacattcacccagttgtggaccgaggagaagggtgttaaacccagattgtgatgtttcacttgatgaagtgcttaatataaacatggaaatatttccgcaaggataaactggcttttatgcctgtgtgttttcaggagaaatagaaatctctaatcaaatattgccagcttttcacccaagtttgactttttgcctaattgagtttgggaggtgtctgaataatggataatgagctttcctgaataaatataaaaattaattaactccaggctctaattcattctgttaccagagttttgtaagcatgttacccctttgtgttcattgggagatcatctgttaccttcttaaatgagtggggaaggatgggaaatgaggaagagctataaaaactattcaggtgaagaaggtttctgcccctccttgccccttttaaaatctccagctcagcagatgctttgtttaaacttgatcaagtgcttgtgaatcttcctagcctagctaaatcataactttggaaggacttgcttttttctctcatgacaatggtttaccacagaaatgattcagatcactttgtgtgcctgatgcctatgtaaaatgatacagtgaaatggaaaccatttacctgtaagctttgggcacacccaagcctgcttcaggagcacatgatcaggcgtgcactctgggagagccgtacacatttgacatctatgatgtgtggcgttttattctatcacatttctgaaatctacactaagagaaaggaggctcttaaaaaaccactgaggtgtggactgggggaaggagagatccgtaaagaacctgtttgttacctgttgatactatttcccattggtaaaatttctaatttagtgtgatccagccctgaaatgctgaggcacacactgaatgactcctgacatctttagtgtttttgttcaggggactcttctgggaatctgtttcatggcaagtttattattcccttttggtttggctcatcagtttacccagcagtcatcttaatcggttttaaaggcttttattttattttgttttctctgtggaaattttacacattcagtagattagaagtagttatttaatctttggttagcataataaaagatcttctagggacattttttgcttgcagtggaaggctagttaaatgtgttcattagtcatgaatctgctttttctatagctgttggaaacgtagctcccctgtgatacagttgtagaatacagaaatctcgttttgctgttacggtacggtagtctacttactttcttccaaaccattaatgttatagttacctttaattgcgtaggtcctatcacccctcaattttaagactctaagcctggcattttatcttacaaaatgaaatataaagacttgtactcagagtatgtgtgtgttttccatataccattctaaagtagagaaagatgagggattcgccagaaactgatttctaataaattatccagaaactgaccccttctcacctcttctgttactgtcactgtggtttcagccacagcatcctttgctgcattgttaccttagtttcctgactgtatccttccttacaccattgatccctgcaatcccatctgcgcgtagcagccagaagggatccacttactgctgtgatcagaaatcctcagccaggtgcagtggctcatgcctgtaatctcagcactatgggaggctgagactggagaattatttgagcccaggagtttgagaccagcctcaaactgggtaatataatgagacctcatctctacaaacaggaaaaaaaaaattttttttttttttttaactagccaggtatagtgctaatatacctgttctgggatccagcatgctctccctgacctgcagcttcatctccaccactttgcccctcactcccaccacaatggctttcttctcttcctcagacatgccgtgcgtcctcctacctggaatattcccctccaaacattcccatggctcactccctcaccttcatcagatctctgttccagtgtcacttttactggaaggtcttttgtgaccatcctacttattataaaaaaataatctgcccaaccttctccttttatttcctctacttgatttttcaatttagtacttatcagctgacatatattttgtctctctgtctctctctgtctctcatagaaggtaaattctataaaggaaggaatttttatgtttggttctttgctgtagctccaatattcaaaacagtgcctgacacacagtaggccctttatatttgttgaataaatgttgacactctgatatctaatttttgtctggtgactaatacgaaaactatagagtgataataaaagcattaccttagtagactggaaagggatgagcgctaggatgaactttctgcctggcgatcttgctgaatttaggaggcagattggggttcaaaggaggctgaaatggctaggatttgcagagcagggtactaaggatgagcaggctatgacagaaagaactccagaaatctgcaaagggatcaccttgagtctggctggatacagtgtacactttgtagggtgtctcttcatgagcttggataaagaacaactgttggggagtggataattcccagcactcattcaagcttgcatcggccagaacggagagagacagacctctgtaatacgtaggatatttggtagaaacattcaaccgaaaaccatcagatatgcaaaaagtaataataataagtaaacaatgtgatgcatagctagaagaaaaatcagacattagaagcaagcccagaaatgacagatgataaattagcagataaggacattaaaacagctattataaataacttagcagatttaaagaaaaacaacataatgaggataatggaagaaaaacaaccgaataccatttctaaagaagaaaaatacaatatctgaaatgagaatttagctggataggattaatagtttaggcactgcagaagaaaaaaacagcatctatatgagaatatacccaagggaagtacagagaggaaaaaaatgtggattggggggtgcctcagtgacatatggaacaatattaaacaagtctgcccccaaaatacttgaaggaataaggttcaagttttttccaggtttaatgaaaactataagcctacagattcaagcatttcaacaaaccttcagcaaaataaacaaaaccacagtaggcctggcacactgtctcatgcctgcaatcccagcactttgggagcctgagtcaggaggattgcttgagatctgcttgggcaacatagccagaccctgtctctacaaaaaataaaatgaaataaattagctggatgtggaggtccacacctgtaactctagctagcctggaggctaagaagggaggattgcctgagcccagtagttcaaggctggagtgagctaggactgcatcactgcactccagcctaggcaacagcaagaccacatctctctctctctctctctctctctctcaaaaggcagtgaaataacgacttatttggggaaaaaataaaggcagagaatttgttgccagcagactagcataaaaaaaaggaagtccttgaaacagaagagaaatgataaaagatggaaatttggatatatactaaagaatgaggattgctaaaagtgacatacatagataaatatgaaatatatttttattttaaaatttatttaaagcaaaaataaaaatacatcatatttataacatagaaataaaaaatgtatgataatagcataaaggataagtggacaaatgctgttgtcgtatttttggtaaaatgcactattatttgaaagtagaccatcgtgaattcgatgcatattgtaaaccaaatagaacactaaaaaatgaaaataaagagatatggctaatgtgccaatggtggagataagatagatgcaaaaaaagaaaaacattcaaaagaaggcagagacagaggaaaaaaggaacaaagatcaaatgagtcaaatagaaagcagctaaactagcaatatggcagatttaaatctagccatgtcaatagttatattaaatgtaaatgttctaaatacctgaattaaaggatgaagattgtcagattagattgaaaaagcatgacccaactacatgctgtctgtaagaaattagaaaaagaacaaattaaatccaaagtaagaagaaaggaaatagagtagaagttagtgaagtataaaacaaagagcaaagaaaatcaattaaatgaaaagctggttctttgtaaagatcagtaaaattgataaatttctagctaaactggccaagaaaaaagaaaagacatacaaattaacagtatcaggaagaaaaacagagaattcaaaggagtgtaatgcaaactttatgctagtaaatgcaataagttagatggtatggaaaaaaatgtgaacaatacaaagcagactgtggttgcctttggtggcagtagcggggtgggagtggaaggttgaattgactggaaccagaagcacaagtgaactttttggggtgatggaaatgttttgtatcttggttgcattgatagttaaatggttgtagacattgcttaaaactcactgaacacttaagtgggtatgttttattatttgtaaaatatacctcaaaagcagttttaaaaatgtattcaagtacatacttaagatctttgcattttactctgagtataccttaattttaaaatctgttttttaaaaagtattatgtagataccttttattttcccaatgtctttattaaatgacatctccacgttttgcttcttacctctatttttttttttttatttctctgtctctcaggcatgcacacacacacaccaaaaaaagtacatatgcataatccttttggctgaataaaatcagttgcaactgttatttcggcccttatttgctccgggtaaatattcgttagctgagtggtttatctgtatcagatatttcttacatcttcatccagtcacaccagctggactgaccagattgtttttcacttcaagggcagaatttgtactcactgctgaatgcttccaaatgatacgtagaataacaaatttaagacttagatttttactttttcaggtctttttttttttttctgtgctgtatagcatttccctgaaagcttaatctcatctgtaagtgatgcagtggatgtgttactattggattaatttatttactcttaggtaggtttgtaatctgtcatcatgctgttgtttttttgtgtgggtttgtttttggttttgagacagggtctcactctgctgcccaggctggagaggctagagtgcagtgatgtgtttatgggtcactgcagattcaatctcctgggctcaagtgatcttcctgcctcaaccccttgtgtagatggaagcacaggtgcacgccaccacacccggctatttttttaaatgtattgtagagacgaggcatcatttttttgcccaaggctgatcttgaactcctgggctcaaacaatcctcccacctcggctcccaaagtgctgggattacagatgtgaaccaccactcgagctccatcattctgttattagttgttctctagtatgagtcaaaaactcttacctgcccttttacagttttataaataagtaagcagaatagcagaatgtggacattttttaaatccaaattgaatatgcacatgactcaaggagtcaaatagtaccgtaatcggtttatgataaaatccagtggtttggctgggtgtcgtggctcacacttgtaatcccagcaccttgggaggctgaggcaggtggatcacctgaagtcaggagtttgagaccagtctgacctacatggtgaaactactaaaatacaaaattagctgggcatggtggtgcatgcctgtaatcccagctacttgggaggctgaggcaggagaattgcttcaacccgggaggcagaggttgtggtgagccgatatcgcattatttcagaacaattttccacaagatcagtgagtgctgtccaatagacatataatacaacccacatacatgactttacattttcttgtagccatagtagaaaaggtcaaaagaagcagatgaaattaatagcctgggcaacaagagcaaaaccccatcttttaaaaaataaaataaaatatggtggtttgctgtccccacctcagaccatttctctggtctttctcattgaccaccactcccaatctttgttctgctgattgattacagcttgtatatatctccatatttctaagcaaaatgtttatcttttttaaatttataaattctttttattatttttcagagacagggtcttaactctgtcgcccaggctggagtacagtggcaccatcgtagctcactgtagcctcgaactcctgggctcaagcagtcttcctgcctccgcctctcaggtagctgagactacgctacaggcacataccaccatgcccagctcaaaatgtttatcttttgatacattattcgagaccattattaaggtggatgatttagttttcttaaacagccatcccctttcttttcctcccctctgcttcaccgcccccattttcccaatgttttaccttttggttaaatcagtactcattgtttacattatttgcctctgcacatagtcacagatagtattgtactgtactgtactgtgtttcttttttaaacattatttctgttgttaataattgactttttaatttttttcctattttgttttttaaagagatggggtcttactatattgcccaggctagagttcagtggctcttcgcgggcatgatcccactgctgatcagtacaggaatttccacctgctccatttccaacctggaccagttcaccccttcttaggcaacctggtggtcccccattcccgggaggtcagcatattgatgccaaacttagtgcggacacccgatcggcataacgcatgcagcccaggactcctgggctcaagcagtcctcccgggctcaagcagtcctcccacctaagcctcccgcgtagctgagactacagacacttgccaccacaccaggttaatttttgtgttttttgtagaggtggggttttgccatgttgtccagactcatctcaaacttctcagctcaagtgagcctcctgcctcagcttcccaagtagctgggattatagacgcatgccaccacaccccatgataattgcctttttttttaatttgcataattttctttgtagcttttgctaatgttcccatatcttcttatagccttacagaatgattttccacaagatcagtgagtgctgtccagtagacatataatacaacccacatacatgattttacctttttttgtagccatagtaaaaaaggtcaaaagaagcagatgaaattaatagtatcttttacttaacccagttcattcaaaatgttatttcaataaatggtcaatatttaaaatacttgagatattttgcttttatttatttcttttgttactaagtcttcaaaatccaatgtgtattttacacttacagaacatctctttttagactggccacatgtagctcagggttactgtattggacagagtggtttcagtttcaagtttttccttggagacatcctacttgaaatttccattctccatgtatctgggtggttggtctatagacttgccactcacagctgtcatcttgagactttctttgcttttcttctctattggatattcagtttcctggatttcaggtcttctcattttcctctagtagttttgttaggtcatggttggtatggcatggttgggatagcgtgttcacacagctatctcgtgagtcatactcctccaatccagcctgctcgcttcccgtgtctgtcatgtagttgtcaccctgctatctctccctccagtttttgcagaaatttcctttgtcttcactcttggtcttcctctcccatcccccatgtatcctatatctttctctttcttggtttatttcatcactcaggtggaaaagatgctccagtggattactgggaaaagggggagcatggatgataaaggtattgagaccttacacgtcagggaatttttttttttttttttttttgagacggagttttgctcttgtccaggttggagtgcagtggcgccaactcggctcactgcaacctccacctcctgggttcaagtgattctcctgcctcagcctcctgagtagctgggattacaggtgcccgccaccacgcccagctaattttttgtatttttaatagagacgaggtttcactgtgttggccaggctggtcttgaactcctacttcaggcaatccacccacctcggaatgtttttattgtcccttctcatttcatgactgctgggctaggtatagaattccagaatcattgttcttagaatctcgaaggcattgcttcattgctggccagctttcagtgttcttgcaaagtctgaagctgtgctaatcacctcatcctttgaaagtgaactgttttttcttcccagaaacttacagaacattctctttgtccgcagaattctgggattgcaattactgtgccttagaatgggtctgtttttatcattatgaagagtactggatgggtcgggaggttttcttgaattacttcttgatgttttctttccttgtatttttttgtttgctaattttctatttttttttcttggtttactttcttgggcagggggatttcttctacttatatttgattcttcagttgagcttgtcatttttgctatcttgtttttaagtttcgagagacatctttgttttatataacattctgttcttaatacatagatgcaagatcttttctttctgagtatattaatatgtatttgaaatctttctattctctgcagtttgtttcccccaagggtttttttttttttctggtttttgttttttgtttttatgttagagactttcctgttatatctggtcatcagtggtacctgcatgtggtggagagtaggggcttattggagtatgagaaccttgagcaggtgtaaggagcctgtcaacactgcgctggcctcagggcctctagggaggctgccagttgtgcattctgaggataccttttggttgtgccttttgtctggtcagattatctagagatgctctgcctcctacctggaggagaagggtctagctgccagcggtgtgagtgtctcttggggaaaaggactcgagttcctggtgtttggcttgtgtatggccgcttaccccatttttggtggagcgctcacatcttccactgtgccaacagtcttgctgcagttcatagaccttctggtttacatttttccagaaagtatgtctttagatttctgcagaagtctgaggagcatggaaggagcttggggaatgagatggcaatccaggtcttcccagatggctctacctttatcccctgcagggaatcccactcctccttcctgactgggagcacagccagagccttgggaggaatctggagtggaaatctcgggcggtctggctttcttactgttcacttgtaattttgctttctcacaactgccaaccactaatcagcctgatttccagcttccagaattctattgctgttgtctgctctcctattcccaccgtaggggatggggctgtctttttttttttttttaattttggtaaaacatacaaaacataaagtgttccattttagccatttttaggtacacagttcagtggcagtaagtacattcacgttgtgtgtatttgtttttttagtaataaacaatataaaattttttaagtaataaaacacaaataaaagattgtttaatgtgattatcgtggaattttaggtgtgatcaggagccatggtgtagtcttctgttgaaacagggtgataggatttgtttaccacctcctaggaaagcagttggatagtttgttggcataaaagtacattttatctatttttaataatcgtagctttatagaaattgcagttggaactcccaggcctggcattcaaggctctctgagatctgggctacccacccatgtcctccagccgtctgtcgcacctcctactgcccactcactgttcctggcatgagatgtgatctccagcccccatgcctttgctgtgcagggtgttccagagtgaattgtccctcctgtctgtctctctgccctcttcctcgtctttccatcttcctgccccacatcactgcctcctacccaaggcctgtgctcattcctcctcggttttcccccatggcctggtacatacctctgaattatcaccttgcatttcccatattgcccggctctctttgatgtctgtttctttgctgggtcttcctcagtgtctgacggtcagttaaatgtctttattcttttttgtaggatatccgacatgaagccagtgacttcccatgtagagtggccaagcttcctaagaacaaaaaccgaaataggtacagagacgtcagtccctgtaagtatccacgtggccggtaccagtcttgctcttcctttgctgcaggcctttttagtcaagactcctttcgcctcagggtttagtataataataaatcaatgtagcagaggtttatgacgcgattgtttcctatagtaaaggcattagagacttatagtaatagctcatttttccaccattatagaagggctcaggtttcagtttctggaaaattcagtgaagttcaaagcacttttcttaagctttgactgtttttgtgatgaatcattttcctaccagctgaagcagagtatagcaggcataataaaaccttttctggatgactcagcagcagcgtcattagggcatgagcactgtgttccgctgtaatgaagccccgcacaggcattcggggtgggcactgtcgtcccctgcgctgaatatgcaaggcagctctgtctggagtccccaccgcctccacccccgccaacctcatcatttttctccctctttcctgctgttagttcttcctaggattgtcagtgtgcctgctggcctgtggcagccctgtccgccttctgagtgattggctgtcagtctgccggtagctgaaaagtaaataacttaacatgttagaatttgcataaagtaaggaaaactggagctgagtacaggacttgaactgcgccatctcctctaggccacagaggcctttttgacccccttccaggtctttagacattgtcaggcagtgaggggtcgtagctgccagtgtctccatggtagcgtgctctgccagggatgcagaagattctccagtcattcctccagtgggcacttcctgcaggtcctgtgcccatggctgggagtggtggctgtcattgttctctgccagaagggttagcagtgcatcctgacctgacttatgtggcgcccagattcctggaaggggtctaaaaatggacctagacttggtgtagaacgtgtgcctcttggcctgccaccatggttccctgcctggttttgtgtgtcagctctgccgcttaagaactgagtggcttcgggcaagttgttctctctcataggagtgtgtgaagatgaagcaacataagctgcttagcccagcgcccagtacctcacgcagacataagtgctcagtaaatgttgtctgtggtggggatggttgtcaccaacatctgaagtgcacttctaggtcatcaggtgacatgattggcgccaacacatggtactcttgatttagcacatctcagctgaggcacctcattgatatttgtttaaaaacaaaaacaaaaaaccttggtgattctgctgtgaagtcctggccagaaacctccagaccgctgatcaacacgcaacagaaccatcaccgttcacctctttgacatggtgccaggataccctggatctctagcttttgctatagttgctctaattagggaataatcttgtctttaatattcctttgctacattttttaacatttcttatctaaatggttttatgaatcagttttacagagaaaaaaaaccagtatttaaaatattcttccaggggctggtccaagtacagtagtgtttacaactatgtgatcacaaccagttacagatttctttgttccttctccatccccactgctttacttgactagccaaaaaaaaaaaaaaaaaaagttattccagggaaacaattctccaactttttcactcccaatctcactcctcttatcttcctcccgtactcctatcctcctcccgtactcctatcctcctcccctactcctatcctccagtagaaacagtcatttgctgtgaaggttatgggggagaatgagtcaaggtagaaggtcacctgctgcccagctcacagtgctgctggtgatgacagcagtccacagttacaggcacttgctgaacgaggggctctgtatacacctcagctcattgactcttcccacaaccctcttgtcacctaccatttagcaaatgaaaaaaccaaggctctgaggtgagttgtttgcccagagtcacccagtgctgtttgaacccactcacataaccaaccaataccattatgtaatttttgaggtcttttatctctgtgatccacttaaaaattatccaagtatctttatttgtactaagcctccataatgagaaacagtgttccagatggtggctagttttcaaagacatctctctttggaattcttctttagaacaaaaagccccagaccacttatccccattcatatcccctttggacctagggagaaggtactatttataggtgatcacctgagtttattgtcccttgtgctgtgccagaaataaaggtccccacctgctcttattagctctactaacaggataaggaaagtggccctcagagagctactgcttttgtgacaaacaaatgatacaagaaaaaaaaagtggctttttaattttagtgacctggggcaggacttccaaatgaaagtttatttctaaaaactaaaaggtaaatttaatatactttcagtgtttgggcttaaattctctttcaagtgtctttgtgatatgctctgaattttaaaaatttagaatcattgaagttcattatacttgaactttaaaaaaaaaaaacaaaaacctcgtataaaggtcaaggtatgacttcatgctgctgtgtacttaggtcatttaatcttcaaaccactggatagaggttaggttgaagttcgatcttaaatcctacctactgtagctcattgtaccagcaacagctgtagggactaggtggaattcatggtgggttttgttcccttttaaagattgaagccaccatattttctgccctctaaaagtttatgtcagccaggcatgggtggctcacacttgtaatcccagcactttggggaggctgaggtgggtggatcacttgaggccaggagttcgagaccagcctggccaacatggtgaaaccccatctctactaaaaatagaaaaattaggtgagcatggtggcctgcgcctgtaatcccagctactcgggaggctgaggcaggagaaacatttgaatccgggagatggaggctgcagtgagctgagaacatgccactgcactccagcctgggtgacagagtgagactcttgactcaaaaaaaaaagttatgcatcagagaacagatcctttgatgccctcctctgccctgaaaggtttttgggggagagtaataagtatcacaacaagatatgacctgagaacagatttcccagataggacatgatccatgttttaatatggcttactgctgttgcttcatagtgtgaagcttcagacacttctgaaaaccctttcagaaaatcccagtcgccccatactgatgactaatctcaactaaaacagggcttcagccagtgtgaatgccactaatgccaccaactcacctttgcttttctgtagggtgtgcacctgtatgtacacattcagcttttccgggattaacctctgagttctggtttgtctttcagttgaccatagtcggattaaactacatcaagaagataatgactatatcaacgctagtttgataaaaatggaagaagcccaaaggagttacattcttacccaggtaagcagattgtctgaattttctatttaatgtcaatttaagagtttgagagtgctgttatccacacctcaaataaaatctgccacatcctttagaaggtcaggatttcagcataccaaaaagcagcaaggaagggggaaaaatcatccttcaaaggttcagtttggttataaggaacgctaatcttttctgggaagcataagatgacattgctggaaatgagagcttatagaaaacaacattaaaatgccagagttgcctgtgtggtctgttggcagagacagcagagccatggctggaggagggtctgtacctgtgttgcttccagaagtatttgtcgtagagcacttgtgatggcaaatctaagaacgttagcagtagaccaggaatctctgtccagagccattcagagtagctcagcatggttctcattctttggccagaagaaaggcatcattggatcatgtgaacaagcatgaaaaatgacttaaaatttctgttggcttttggcatctttatggaaacaaaatcctgaaagtggtttaataattgagcctcttgtaaaacactcagtggcatgtgaccaaaagggtatctgggaaagaggataaaaagagtttctttttaattaatcttctcaagtcttaacttgttacctgtaagttggtctaaaaagactgggtttcttattttgtttttcatcataatttttgtttctcattccatgtcagctttcagtcttatatggctttaggccacagggcgattttgaacatttgtaattttgcttaataattaggaaattaaaattctggggaagacagaatgctctatgaagaaaggctgctttgagcaaggagctaggtcagggcgcgttcaactgaggcctttcttcactgcctttttgtcttgtcccagttcctccccatttatgactaaaatcagcccagatgcttctcgtcatctgggatgcagagcatcagcccagctgtgttcagtcctatggggccattgagtaagttcttggtgcatggatacagggcaggcctttaccaggccctgagcccctggtcctcccagcacctctggggtatttaggggaggctgatgggggagggggttgataaggcgggagatgtctggggatgaggttgaggcaaaagtgacttcttgaggactttgctttttggagaagtcaaatttcctacttcttgatttcagcccttcaactctggtatggagtcaggaagccctttaaatacctgttgtcgggtgtatcatgtcaagtgttgcattagcaaatgaccatgtatccttgtgctactgtcctgcctaccccgcatcctagcgcttccttgggacatgagaagctctgtctggtttgtgaggtggcactggggatgttgagaaactgtttacacagtttccctttgccctggggatttactaaaggagtcgaggcagcctgaccccaaagcatcacccctggacactatgaccgaaacatttccccagtgcccaaaccaagaacacccttcccatttttttttcagtggtgttcattatgtaataatacaagtctctcttctcattttttaaaagtcagaagtacagaagagcagagaataatgtccaaggggccctccttcacctcccccgtgcagtgtcagctaagtgtggtgcgtgtccttgcagatcttaggggattgtgatccttcagaccattctaaactggggtggtgctgggagttagggaaggcatgaagggagtagtggagagctgcagtgactggggtcttcatgccagggtggagaatgcaaggcccaggtggccagccatgtgccacgggatttctggctgccaagagctgtttatctgttcactggggagggaagagttaaatgtggtctgcttttctccgagtcccttcagcacagggagtgctgacttgtcttgttcaggtagtaagttcaagatgagctcaggaaagaaagtgagaggacactgagggctagtggttgagccaagtgtgatgggacttaaagggagaagatttaaagaataaggagcttatgggccggggacggtggcttacgcctgtaatcccagcactttgggaggctgaagcaggtggatcacttgggtcaggagttcgaggccagcctggccaacatggtgaaaccccgtctctactaaaaatacagaaattagctgggtgtggtagtgtgcacctgtaatcccagctacttgggaggctgagacaggagaatcgcttgagcccaggaggcagaggttgcagtgagccaggattgcgcccctgtactccagcctgggtgatggagcgagactctgcctcaaaaaaaattaaaaaaaaataaagaggttaggtgaaaatagatgagaatggaaaccatgagaagaagtgatgctggccaaggacatgacaggttctgatgtggaggtgataggcaatgtctcttccagccactgctaataattgagacaaactcaaggcattcataccctgtgtccagtaaacatctgtgcccattgccaggtgagctggattgaaatgggccagctgctcagcagacaccctcatgccccagtgactctgttccccttgggccacctcattgaccatttatgtttctacatctcctaagtttgttgggccaaggatggaggctgtctgccgtcagggtcctcattgctgatggtaggaatagttgctgatgtttcattggatgttgctgtattctagggactgtgctaagtactttatagaaatgaacatacttcattttcacagttttatgaatagggactattattagtcaagtaagcgatggggaaactggggcagggagcgatgaagtgacttgcgcaaggtcacaagatgatgtgattggaaccaagagaagtgttgtggttggccacgcccccacactgcctctcatctgcaccaaggagttttgtcccatagcccaagggccttggggacgaatctcagtggaggcccttagcgggcctgcctgagccagaaagcagaatcggcatttttctgtccttggttggcccagccctgaactgagatgcggaaatcgcctttcgctgcctggtagaaaatggagctgcagttactgaccaccaggcagagagaggtgggtccctgtcccagcctcagccaccactctgcctaagctgtggggactgagggcgctgtcgttagctgactgcagaaggtgagcacacgctgtagcatgttatgtttcagatgtcacatgttgtgttattgtgtctttgcagggccctttgcctaacacatgcggtcacttttgggagatggtgtgggagcagaaaagcaggggtgtcgtcatgctcaacagagtgatggagaaaggttcggtaagtctcggcttcatttgctgtgtatgtgatcatgcataccactccatatagttaccattttcgtccagatttttaaattatttttcttgcctttgtatttcctttacgtagtatttttatttaaaaaaattaaaacagcagcatataaatgcatgttggttgtcaaccagttaatgaagtgaataaaagggaggaggcggaagaactgcacggacctcttcgcccccgccttctcctgtgtggtgcgtgtggcgctccgcccacctgtgctgcctgtgcggctctcatcacagtgtggagttgtgtgtggagttatggagacctgcttttatcttgaaaagcaagttcttagtgcatcttcatggtgtctgattttttggctggtgagagtgtggctacctctgcggagctgtgggagcggctgactagatgagatttgcctccattcagtacctagactcttgccctgccacacctcttcggagtgagcattgacttcaggatgtgtgtcattctaagttcctgcaacttttcaaacacccctcgggctagcgtgtggctgcacggtgtccatttgtgcaggccaccactcctcttgcatctgggtctagccacctctccttcttgacttaccatagttcattttgtaccatgctttcagaatgagctttctcaaatccaagtctcaccacggttcttcccagctgaaaacccttgtgcggttccctttgcctcacaggataatacatggtgtggcttacggaaccctgcaggtctggccctaggcccctggacacagacctctcaccactcttggaactttagccaggacaaagttttctgtttttagtttcttaccatgttctctgggccgaggagtcccagtgcccacgttcatcccacttgcaggcacccctggacggctgcccccagctccccaactgcctgcattctcccctgccctcctcactctgttggaatagctgagaatagccgatttctgggcagccggcctcctgtgtagactgtcctgtgtagactgtcctgtgtagattgtctgtgtagactgtcctgtgtagattgtctgtgtagactgtcctgtgtagactgtccatgtaaactgtcctgtgtagattgtctgtgtagactgtcctgtgtagactgtcctgtgtagattgtctgtgtagactgtctctgtagaccgtcgtgtatagactgtcctgtgtagactgtctctgtagaccgtcgtgtatagactgtcctgtgtagactgtctctgtagaccgtcctgtgtagattgtctgtgtagaccatcctgtgtagaccatcccatttagaccatctgcctgtgcaggcgcaggccagtgttcagcagggccacaggctcctcggcctccctgccctcgctgctccccaacactgccaaccctgctgcggggtccaggaggagatgggctgaggatcgtggagaccagcaggagcgtgtggcccaggagcagggaactgggtgtccttgggccttgccaggtccaggctcagctaggacacggctctcacagctgtcctggttgcctccggccacagaagaaggtgagggctccagagaggccacctttccaaaaaaagcacagtcatggccctagaatgtaaaaaatccaagtgttaagaaggaacacatcaaaggaaacttcagcagtgaaaacttgaagcattaaccacgaagcctctgcctccaccacacacaaagaaacggctttagttactcgcagaaagtcttcctcttaggacagcgcgtgtttaaaatcataggggtttggtttgttttgttttggggttggggttttttgggggttttttacccttgcctactttttaaaaaatgaaagtgtttatttgcccaacaataacagacagggagcttgcctaagtgttctgttgatgatataatgtatcttgtcttagaaaaaaactttttcagtgaaaggtggtttttaaattttttcttccctccttagtagcttgattagtaaaatgtgaagttacaaatgtgaagcaaacccccacccttcaccactagtcagcaattttgagtaaagaaacaaagcatcaggtgctcacagcacacactgtcttagagggaaggggaagcctggtggcctgtggaagccttcagcatagctccatctgcaggcttctgaccctcagcactactgacacttgggctggatcattgtctgctagggatccgggcagggagtggctgtgctgggcgctgtaggaagtttagcagcatctctggcctctatccaccagatgccagtagcaccccctccccagatgtggcagtcagatgtgtttctgtctagactccagactttgtccaacgtcccctggtaggccaaattgcccccggttgagaaccaccgctctagatggtattgagggttgggaattttaaatcaagacatttattcagaaattaccagatatagtagcatttgcttcttatttatttctttgttgctaagtgtttggcaaaacctctttgctgtgagcacaaggtttgctttagcaattgttgtcacattacagcaaggagtggtgtccagcgctgtagttatgtatttgagcagtgtccagtgctgtagttatgtgttccagcctcaccaggccctgtgcttcattgtctcccactcaagactgaccacaaatggcccacagatccactgtgacaacctttccctttgggttactgtggtggcatcgagaacatggctggttggctttgctgtagtttactgtgataactgtgccagcagtccctgctttcctttgttaagtatcccattccactggaggattacttgggcgtgcagattggcatgaaaagcaatgtatggtttgagattgttaaagtttctttgggatcaacattttcaattctgtatcagcattatccctcccagagggctggctgggagaaatcatgagaagttacagtatcttatttgctcagctaatctaattataaatgatccacacagcttgtggtaaaaccagcttttggggagttttcatttaatgcatacttgtcttctgatttccttccttcaccaaatagtgtaggatgctccctcttatttttggcaaacatgcctgttatcttttgggaccctgggcttcctggaaaccagttatgcagaagatgattgtgtgtgttagactggggtcatccagatggctagagttctcactggttctgtttaaggattgactttagacacctcagtgtaggctgcaccatggcgtaagggttgggattgttgtttagaagggggaagtaagcaaggtgagtttaattggccattgcagaatctcacccgtatctccctcctgaaatcctcactaaagctgccgtttgctttcaggtgctttcatgcacaagacactgcattttgtatcacagggtccatataattcatttttctctcgtacttagttctctgtgttaagaattacttacttagttctctgtgttaataatttttggcgaaaccaaattacccgtcacagggttactgtagatgtctttcataggttttccaaacaccacttgcccacttgtttgggaaggccccaaggactgtttaacatctgccttcatggtggaaacagcaactatgagagatgctagcatgttggcactgccatgttcctctggtaccagcccaagataggactcaatttgaggcctggtgaagtactgtgttctaataaaaatccatctacttttcatggccgtatatatcaatgtaatagggtaactggaaatgtgatcttgtgccttttaaaaattttgtgtgtttaaaacaaaaatttctattggaaatgacagagcatagcttgttgctgtagacacctgagagtccttaaaaataaatattgggttattgacacttagttgcatgacagaattcctcacttgtacagttccaaagtcttagtctttacccagattacagagggttattaagcattaggtttggttttgaaagtgagtgcttgctgtctggaggtgagctttaagactcgtctgccctgcttatgagatgaggaagggtggcctcttcctcctgcatttctgttcttcgcttccttctctgtctgctcactctgtggaatgcccaccccagcacgggtggggtggaacctgtcagatcagtctcttgtttctggggtcttgaggcattataagatctagttgttagaagtgtgggattaattcatcttttcacattcttctaagttcctgcttttagctgccacacccactttggctaagtgggggtcttgccatgtaattagcgcctccatgccaagtggcagaattgcttcaatggtgacagattgtccccattcaagagttcacttttggcaactcatcattgatccaggaaggtgacatggatgaaactggctaagacttcagacaggcttgtgtccagactcttgagaaagctctgttggcttctggtctggcactgtgaagtttgctgtgatgctggcaccacaacctggtgtttcctaatttgtttctcccacattttgctttggttttgtcttttgggcagcttccagctccagtagagcaggaccaataggcatttgtggttctatattcaccctcctcacgtgcttcctggctcctcattgcccccagatgatgccacaggtccctgggcctgctgccagtcgtctgtgatctgggcctctgctggccccttctccagctgctcttttcagcctcttatttgcagtcactgcctaggaaatcctagtcatccttcaaaacctgcctcttgcacagagctttctctgatctctcttttctgtaaccttggctgacctgaaacatttccctcttctgaattcctgctgcatgtccgtagcatttccccctcagccctcccccatagtccaccttgtcactgctgggcacagcagtgtcttctgacagacagctggccctgaagtggttcccttcacccacaccatcctttgccccagaggaggtattgagtgggtcagtgcacgtgaactgccagtgtcatttgccaaagagctgttgacacacgctgacatttcttttgctgaaaatcataagggctttgagcttccctctgtccaggcacatggtcaggctgacccggtagctctgcccctgctgacctgccatttttgtccacaacagttatccatgagcagaaacatttgtgtaactgaggcagaaacttagttcaagtaaaatgtcactaaattcgagtcagtttttgtcttagaccctaaatgaaaccaaattttcataaattttcttgttttaaagaaaaatttaatgagctacatttaaactgagaacatcagatagtgtctgagattatcaaaatagaacatcaaaagtatttttctgaatgaactgaaccaaaccagaatgaaagggcaagccctggggagcctgtctccaagccttctctgaaagggagtctgtatttggtgataactgctcagcctctccaaagggcctcacctgctgtctctcccagttttatttttaattgcctgtgagttttctgtgcagggtaaggcacctacattctatgccagcagcctgatcaggtcctgggtaatgtttgaaatggctacacagaggagtttcaaagccttttgttcaatctggcttcacctcgtagacggtgagaaagcgtcagagccctgcaggatcccgttgccacgtttgaccggggagccgatgggtttggaagtctgagccctgtctgcacaacctgccccggtcagcagcttcgtgcccccacccccatctccccatgaggcaggcatctgtgctgaccatggcttccatgttcagaaacccccaggcctttgagttatcatgaagcttgtgggatgtgctccaagcctcctgccatagaaaaactgccatattgctcacaataattcactattatttgtttccccagttaaaatgcgcacaatactggccacaaaaagaagaaaaagagatgatctttgaagacacaaatttgaaattaacattgatctctgaagatatcaagtcatattatacagtgcgacagctagaattggaaaaccttacagtgagtatagcacacacttcagcacttcaggcggctactggttcacatgcctcttcctttatcccttgggtgatattacctaatgtcagtgttcctggcttttgtataccccgagcaagatgtggtttgggcactgtggtgagcggagcttacttgtgtacctaccaagtgcccagggagggtggaggccacagtgctctctctgacctttaacaacagttaacaccagttcttagggaaaggagagtttcttacccaaaagactggttcctgcttgtgcagctgcagagggactggagcggcagcctgcaagtcccagtgaagcatgctgccttctttgtggtcctcagtcttcgagtctgaagagagggaagaaggggtataggggctcactccagtttcatagctagtgaaagttttctgggccaggtcttgggtttttttgttgtgggaagagtttataacaccagctacttgcttggtaaaagttggtcttggaacatggcaaggcattgtggcaagcagcactgccgctgaacgcgctgctcctggggctttggaataattcccctggatccgtaacttgggggtgttcatgtcattctggggaacagtggagggagtgcgcggcagcacctgggggcaccagtgaagagtggccagccaccaacctctagaacctaactggggtcgaatcctggccccaccttactagctcatcacagtgtctccgtttcctcttctgtcaaactcaggttttgcgagggttctgggaggtcctatacgggaagggttagcagttaccatgggtgtgtagcacgggctttatctgaagggaaggtggagccgtagggagaccatgtggagtggggctccagggctgtgtgggtggggagggatctgcttctgggttaccccatgcctccccttctcaagtactactttttaatcatcatggctcctgccattcatttcatagttgatgtaagccaggtgcggtggctcacgtctttaatcccagcacttggggaggctgaggccaggaggatcactcgaggccaggagttcaagaccagcttgggcaacatagtgagacccccgtctctacaaaaaaacaaaaacagttagtcagacatcgtggtgctcccctatagtccagctactcaggaggctgaggcaggaggattgcttgtgcccgggagttcaaggctgcagtgagctatgcttgcaccactgcactctagcctgggtgacagagcaagaccctgtctcaaaaataaataaataaaaaaaatagtagaagtaagatctagaatgtagcacaggttaccaggacgtaggcaaggggttcgggctgcctggctcttgaggatggtagcagtgcagctgatgtgagtgctttctgccctctggtggtgaccgcgccggagtcaccagccctgccatagccctgatggggcagagggttctgagtacggtggatggaggtgctttctggaagattctcaggagtaacatgggcagtgtgttggaatgtgctagaggatttatgcagtagccttttaaaagaatgctttttagcatttgcaagcctgacattaagagtgacttctgggaaactatttgcttgttgagggaaactgaatttcaacagagcagaagagctgtgcgctttttgcttggcagagtgaatacagccagctcagaggttttgatgttaggatctgtttgctccaacagactttgtttttaaaaggcttttctcagccatagctgtctgttctagcacaaggctggaatgagttccttgtgaaagaggtgagcaggtgtgagggagggtgtcagtgggcggtaacccacaccttcaaggattaaaggaaaacttgcatttggcatgcttgcttcttattcaattttaaaatacattttaacggccgggcacggtggctaacacctgtaatcccagcactttgaggggctgaggtgggtggttcacgaggccaggggttcaagaccagcctggccaagatggtgaaaccccatctctactaaaaatacaaaaaaaaaaaaaattagccgggcgtggtggcgggcacctgtaatcccagctactcgggaggctgaggcagagaattgcttgaacccaggaggcggaggttgcattgagccgagatcatgccactgcattccagcctgggcggcagagcaagactctgtctcaaaataataataataattttttaaaaatacattttaagtccttttcttccccacctgcctccacccaccaaatagaagaggtatttcttcttctttaatgtcattaaggttatatggataccattttctagagaggaaagaatgatggaattgcctagtgtgagtctagcaattatcctaacatacacaaatttctccttgttctgtgccaagatactgtatttaatatttaatgaacattaaatattatttactagtgtatttaatggctgaggcagggttaaatatgtattattttcatcccagcagagttgggggaggtcctagtaactatgccatgagctctgtgagggtgaggtggtgtctttgcccccgcctccctggcacagtgactggcacatgattggcatagtgtggacattcgtcaagtgaaggaaggcatcatgagcagatctctggcctgaatccttctgccatcagctgctcgccaggtggccctggcactgggccacagggaaactctccaggctggtatggttcctgtctgtggctgtcttcccgggcccatgttaggagactttcacttccagagccctttccctctcagggccttgcttaccaagtgactggttcccatttactaggagctcttaggtcattgaagatgttgcgtactccccccagtgagggctgccttttgatcacagccgccagaagcctcaaggaaggagcagagctggaaacagacgccaggccattgcttctgttcctctggggcagacccagccacggaagagacattctgggacaagggctggggtccacctttcaaacgtgtctgcagcaggctctcagcatggactctctgcctccaaacatccacctcctcatcggaaaatggatgggagtgcctgcctggagcagctggtgggagagcgcagcgccagcacgtaggacacactcggttcatgggctgatgccgttcgcattgactgcctcttcagctgggtgttgagccacaccttggagtcaccagtctttggagaccaagtctgctacttttttctctaaagtgacaatcctctgaaacctccagatcatcttgaagcccccgtctgaaagttgcccagagccagtgcctcacctgctgttccttgttcactttttcacgggaggccttgcagggctttatgacaagattttatgggtggctgcccagcatcattgtgactcgtgagacagagagaaaccagttgtaaccatgtagacagtggaagtgatagggagaaaagaggtgaggggactcttcaatccgaagggaaatgaagtctaagcaggcgcaccctgcaggttcagtgtcaagcccagggcctggccccagggtgtggtatttgttgactgggtgtgtggaccctgggagaaagtctgagaatgaatgttcctcttagaggtagagagtggaaggtgactctgtgtgtacttggaattagtgatttctgtacagatgattcttttagaatcatcatgagtatttttctctttcagacccaagaaactcgagagatcttacatttccactataccacatggcctgactttggagtccctgaatcaccagcctcattcttgaactttcttttcaaagtccgagagtcagggtcactcagcccggagcacgggcccgttgtggtgcactgcagtgcaggcatcggcaggtctggaaccttctgtctggctgatacctgcctcttgctggtaaggaggccctcgcgggtgccctggggagctcctctacctgctctgctgtgatgttttttcctaagtagaaactgaagcgctcctcttccaaaatacagagactcactgtgttagtctgtttttgcgttactaataaaggcgtacctgagactcggtaatttgtaaagaaaagaggtttaactggctcccggttctgcaggctgtacaagcatggcaccagcatctgctcggctcctggggaggcctcagggagcttccagtcatggtggaaggtgaaggggagcaggagcaagagatgggggaggtcccagactcttaaccagctctcttgtgaatgcattgcctcagggagggcaccaagcctttcatgagggacctgtccccctgacccagacacctcccacccagccccacctccaacactagggatcacatttcagcatgagattgggaggggacagacatctaacggtgttattaacgttgcccttgagaattggacctggctgacttatatctcctctctggctttcagatggacaagaggaaagacccttcttccgttgatatcaagaaagtgctgttagaaatgaggaagtttcggatggggctgatccagacagccgaccagctgcgcttctcctacctggctgtgatcgaaggtgccaaattcatcatgggggactcttccgtgcaggtcagcattgcctttgtttgaatccaggtgtgaccattttaacttttttgtctttgaaggaggctgtcagttgtaaaagttcaaacaccgtctggtgtcaggggaaatagctacccttcatgtttaaaatagctagaaagttgtcaaaatgttcaccatgttgcactttgtgcctttgaagtgctcacatagagagcattgataggaagacgagactttattttcaaaagatttcatcttccaagtacatggctgcagccctgagaggccgagagcccctcgccaagccgtcacctctgctcatgcaaagggatttcctgacaaaccagccgaagtgaacactaataggacttcctcttgctgctctttcaaggatcagtggaaggagctttcccacgaggacctggagcccccacccgagcatatccccccacctccccggccacccaaacgaatcctggagccacacaatgggaaatgcagggagttcttcccaaatcaccagtgggtgaaggaagagacccaggaggataaagactgccccatcaaggaagaaaaaggaagccccttaaatgccgcaccctacggcatcgaaaggtaatatgattgggtcccagcttgttggggtgaggggaaatgactttctgttctagaaacacacgctggtactgaaaccctgtggatgcagcctcctgttggcaagcagcgcttccgcatccttggggaacagggcgcgtggaccacagccactccactcctggctgctggaggtccggtattgggcacagggtggccgcaggacatgagccacttctgtgggcttctagtgccaccttgtggtgcttgttggaatgaggggctcggagccaccgagtagggtttttctgccccccctgacgacagcgccctcccccaggtttccggacagtcctgaaatgtgatgtccaggcttgagtgccctcagtccccacagtggtcctttggggaatgtaaccttttttatgtggtcttgattaaatcccattttacttccttgcaggttaacaaccattattgagtacctattgatatgtgtggtgtactgagttaactagaacatgtcccctggtctgtgttctagaccatcttgctgggaaaaaggcagacccaaagcatattttggtgggggcccatggacagtgatgtgatagaggtgtccgctgaggtggtcagggaaggctgcttgcagtaggtggccgtgcacggaaagtttgcagaatgagcaggtgttagttccagctggagatgactgccggctgtgcccttggtacctgctttctggagggaagttttaagacgtgtgcatacttgacccagcagttgtatacatggagaaatttactttgcagcaactctcaaaacaagcgtgtaaagatgtgtataggtagttgtgtttgttgtggcattgtttgtagtagtgaaaaattagagacaggccaatgatataaccagggacctgatcaattatgttctctcccggtgttgggatattctgtagctcttaaagaatgagatctgggtgtactgatgtggccagacattgcaattgcagtacatgagaaggcaaatcatacagtagtgtgtacaccagtgagtcctccagccagataaatcctcacagtgaccagtcgcccaggcaccttgtgaaccctaccctgggtgtgggtgctatctgaagtacctgggggagggggtgacaagtggacttcaggctgatgtgggccctggcctggccctccctccaagcagagggggctggctcgctggaaggttaacatcatccaactctgtctacacgtggcttgttttttcctagaattcctgccacaatagcagcatccttgccattcattttctccaaagtgagtaacccatctctgccctctgattcctcagcatgagtcaagacactgaagttagaagtcgggtcgtggggggaagtcttcgaggtgcccaggctgcctccccagccaaaggggagccgtcactgcccgagaaggacgaggaccatgcactgagttactggaagcccttcctggtcaacatgtgcgtggctacggtcctcacggccggcgcttacctctgctacagggtatgtttccactgacagacgcgctggcgagatgctcgtgtgcagagagcactggccgctagcccgatggtaggattcagttctgtggtgcatctgagccagtctcagaagaaacagatcaaaggtttttaaagtctggaactgtggaagggctaacaagagaattaaggatcgatgcactggggttttaaggagccctctggtcccaagaatataagagtctaatctcagggccttaacctattcaggagtaagtagagaaaatgccaaatacgtctgtttctctctctctttttttttttattcctttgtttttggaaaaaaatagagttacaacacattgttgtttttaacctttataaaaagcagctttttgttatttctggaacaaaaaaaaacaaagtaggcacttatgaaactttctcatacccttaggtgatgtaatcagccatataatttatatttgatttcccagggaaggaatcccaaacttttacgaatgtaaactcccttggagaagagggttaggacgctgttgcgctcaagcccccctcagctgtgtgcacactgagccaggacagggtctttgagctttcccactataagaagaacagcaacaaaaggccgtctagaaaaacagaacctgcctctgcttctgctcagggtgtccccgctgggtttccattgtcctttctccattgctccctcctgtgacagccatcttgctcatgtaccagccctcatcaccccatccccataaatgggtgtcctcgaggcctctgcctgggggtcagaggtcaccacagggtggccattggcatgtcaacccgctgttaattcagagaagtgggctccacctcattgggagaagtgccatttcagcagaaattcacacgttagacgtgtgttgctgttaagtaaggggaagagagaggactagcctcagagctctggccatggaaatgacctcctaagactttttcgtggttttaaatattttacctctttccaggtggcatctgagtacatcagatggttttgcaaaatgcaaacaattttttccttggggatgatttttggggagagggggctactgtaaaaaataaaaccaaaaccccctttgctccctcggaggttgaagttgccggggggtgtggccggggtcatgcatgaggcgacagctctgcaggtgcgggtctgggctcatctgaactgtttggtttcattccagttcctgttcaacagcaacacatagcctgaccctcctccactccacctccacccactgtccgcctctgcccgcagagcccacgcccgactagcaggcatgccgcggtaggtaagggccgccggaccgcgtagagagccgggccccggacggacgttggttctgcactaaaacccatcttccccggatgtgtgtctcacccctcatccttttactttttgccccttccactttgagtaccaaatccacaagccattttttgaggagagtgaaagagagtaccatgctggcggcgcagagggaaggggcctacacccgtcttggggctcgccccacccagggctccctcctggagcatcccaggcgggcggcacgccaacagccccccccttgaatctgcagggagcaactctccactccatatttatttaaacaattttttccccaaaggcatccatagtgcactagcattttcttgaaccaataatgtattaaaattttttgatgtcagccttgcatcaagggctttatcaaaaagtacaataataaatcctcaggtagtactgggaatggaaggctttgccatgggcctgctgcgtcagaccagtactgggaaggaggacggttgtaagcagttgttatttagtgatattgtgggtaacgtgagaagatagaacaatgctataatatataatgaacacgtgggtatttaataagaaacatgatgtgagattactttgtcccgcttattctcctccctgttatctgctagatctagttctcaatcactgctcccccgtgtgtattagaatgcatgtaaggtcttcttgtgtcctgatgaaaaatatgtgcttgaaatgagaaactttgatctctgcttactaatgtgccccatgtccaagtccaacctgcctgtgcatgacctgatcattacatggctgtggttcctaagcctgttgctgaagtcattgtcgctcagcaatagggtgcagttttccaggaataggcatttgcctaattcctggcatgacactctagtgacttcctggtgaggcccagcctgtcctggtacagcagggtcttgctgtaactcagacattccaagggtatgggaagccatattcacacctcacgctctggacatgatttagggaagcagggacaccccccgccccccacctttgggatcagcctccgccattccaagtcaacactcttcttgagcagaccgtgatttggaagagaggcacctgctggaaaccacacttcttgaaacagcctgggtgacggtcctttaggcagcctgccgccgtctctgtcccggttcaccttgccgagagaggcgcgtctgccccaccctcaaaccctgtggggcctgatggtgctcacgactcttcctgcaaagggaactgaagacctccacattaagtggctttttaacatgaaaaacacggcagctgtagctcccgagctactctcttgccagcattttcacattttgcctttctcgtggtagaagccagtacagagaaattctgtggtgggaacattcgaggtgtcaccctgcagagctatggtgaggtgtggataaggcttaggtgccaggctgtaagcattctgagctgggcttgttgtttttaagtcctgtatatgtatgtagtagtttgggtgtgtatatatagtagcatttcaaaatggacgtactggtttaacctcctatccttggagagcagctggctctccaccttgttacacattatgttagagaggtagcgagctgctctgctatatgccttaagccaatatttactcatcaggtcattattttttacaatggccatggaataaaccatttttacaaaaataaaaacaaaaaaagcaaggtgttttggtataataccttttcaggtgtgtgtggatacgtggctgcatgaccgggtgggtgggggggagtgtctcagggtcttctgtgacctcacagaactgtcagactgtacagttttccaacttgccatattcatgatgggtttgcattttagctgcaacaataaaatttttttctaaagaacatgaatttggggtgcttcccatttttttctttgcttaatagagctaaaccaggatgagtaactcctgtttctttctatccctgctgatgtgaaacagatgttgtcaatcagctggggttagagttttccacttctaagaattaacctcagcatccctgcattgccagcaccctcaggctggagcgctttccttgactgtgagcttgttgaacaccttaggcctcagcccatttccttcccaaattgacgctttgcctgtgtagggccctcagataacttaacaaacttaccagtgttgtttgaagaacagtgttttgagttgtaatctcaaaaccatatcccttacccaattacctgtaagacacaatggttaccacatctcagtacgtaaagtccacttgatatagaattgacttagaaataagacagattagtatagtttttcatttgtgtacaaaattaaacaatgtaaattccccccaaagtgatttttttgactttttgaagtaattttggacttgcaaaatgttgccaaaatagtacgaagagttccccagtaccctcgaagtttcctcgactgtttcaaagctggctgcaggcccaggctcatgagactgggaagaggacaggctgtggtcatgtggacccacaggggcctggggctgcagaagtcagtgtggcttccaccatttcaggtataaaaaagggcatctaagctttcaagaagagggaggatgctctagggcagcggtccccaaccttttctggcaccaggaaccggttccatggaagacaattttttcacaggcctgggggtggtgagggatggttttgggatagaaacttccacctcagatcatcaggcatcagattctcataaggagcttgcaacctgatctcttgcacacattcagttcacaatagggttcacgctcctaagagaacctgatgctgcagctgatctaacaggagatggagctcaggtggtcatgctcagtcgctcgccactcacctcctgccatgcagtccagttcctaacaggcctcagaccagtaccggtctgtggcctgggggttgaggacccctgctctaggctggtactgctgatgcttaaaaagagagggtttgccagaaatcagatgggacaaaagggcaaaggccgtgccacagagtgcccatataggggagagcacgcctggagccttcgagagcatgcagagaagcctggagactgcatttaccggagctgctgcctgaggccaccctccaagtgtccccacagcgcaccacaagaccacaggagtgacctcctcactggcaggtatttggggaaacaactgctgtctactcttttgggtaaaaagtgaaacaccaatagtttaattgaaatttcagaaaattgaacatatgaacaaggcaaataaatactaagtaagttaaaaacacaaaatatgtccaggaagtatcgatgagaatgttcaagttaaagttctccaatgccattgctacagcaacctcaaaccctaggttctctctgcactattaacacagacatctcaggacatggtttgcttttttttaagacttaaataggaaactaatttttctttctttaaagcaattgcgttcttcagtgaactctttctttaggccagttgatggcttcttagcagtttattgacgagatcctagggtagcttccgaagctgggttgattgattgcatttgggtgcggatggccaaagtgagtggccctactgcctgtgctgctcagggctcctgggctgatgtggtggcttcttccctttgtgctgctgaacatagggaaagtgaggttcacagtccaccatccaccagccgccgtctgtgagctccaccagcactcgcagcaagtcagtcgggctgagagtgtggttgtagaaaccctggctttgtgccttcccaccttccccagctcaccaaggtgacacctggctgctgctgaaatggcctgagcagtcttgcattagcagggccagccacctgccagcctgctgcatccccagtgcctcttgacgcagaagtgccgagcagctgaccggcagcgaggcctggagttctacacacttgccttggagccttttatttagggcctcaacttgcctggccttggcccttttgtaggtggccacctagtttggctcagctctgcatctcggggaaggtcacacagaccctcagccagaagttgagcgctctgttgaggccgtgcagcccctggaatgctgtacctttgccttgcttttttctgcctctgtacaaaagaccagcccatgccctggggctgggtcaatggccggagtctcaggtagagctctgggcagctcacactcctggaggagtgcacagcaccattacccagagtgcaggctatgtccaggctgggcagcagcaaaaaaaacgatgtgagatttgtgctcatcagccaggattttttaaaatattgtgatttcaacatctgcctcctggcaaaagacttctctttgttctgagcagagcttgtccatcttctcaaaagctaaccgtcctttttcacctgaaatagcaaagggacctgtcagcgggttggatcctgccttggcacttccaactctcctgggccagggtggccctagtgcttagtgactgtgggtctcagtggtctctgcaaagcggcaggggagggagtatgtgcgggagcccccacctggtgactcacatggcctgggggccttgtctttacctctaggatgttccgctgaatgggaaccctgccttgcctctggcttctatcccaaaggtctaagaagacagcgaacactccctgccaccccagccatggaggaggcctgccttggcaggatgctacaaagggtggaggtcggctctgtgccagggctgctaacggtgcccatcccaggtgccccagagttgttctgcctgctgggagagctgggtgtggcctctcgcagattctaagggccccaggcaccccgctgcgctgcacagtttgtgccactttttaccgaacgacagtgtggtttcccgggctgccgcccgcacggcctccaggtcagactggcacaggctggcagtctggtcgatgctttcaatgccctgttcgagattaggagaaaaagaaccctttagggggccttctcaacagcaggtagagtccacttagtggccctgcagggccagtcctagcatggtctctggggcctcagccccttccttttctccaggcttccaggttttttaggtggcctcaggttcatgagaggcacctctggactctggaagcgtctcgcctcttcagcccttacacccgctagggagccaggctgttagcagaactcgtcatcctggatgcctgctgaaaggctagaattgaaaaggagacctgctgctttctggaccttcctgcctccctcacgctctccttgccctactctccaggacagcctgtgccagtacttcgcccaactcaggcacatgccccctggctgctcctgcaggccaaggaccggcatgcgctgcagcgccctctactgggcacctggccctcgctggttttctgatcctaaccagcttctcctcttagaatttcctgctgatccatcccagaatgaatgggagttcaatctgtactgaattatctttcatctagcaattgtgcaattccaaatgcaggtgaggttgagggaaagcgggcatcccctcacatccatgggatctatgtgtgggttgtatcaagagtctcaaaaatgctcatattctccggtcctagaattgggtctagcctaaggaaataattcagaactccatgtttttttaaagctttatgcacaaacatgatcataagacatgatttatgataaaaattggatgaagtaaactttcctatgaaagcagctgagtaggttaaattaaggtatacacttgatagccccttcataaagaattctcaagtgaaaaaaaaaaaaaaaaaaagaaaaaaaacaccacaaataaagaattctaggccgggcgcggtggctcatgcctgtaatcccagcactttgggaggccgaggcgggcagatcacgaggtcaggagatcgagaccatcctggctaacacaggtaaaaccccatctctactaaaaatacaaaaaaattagccgggcgtggtggtgggcgcctgtagtcccagttgctggggaggctgaggcaggagaatggtgtgaacccagaaggcagagcttgcagtgagccgagatcgcgccactgcactccagcctgggtgacagaacaagactccatctcaagaaaaaaaaaaaaaaaaaaaaaaaaaaaaagctaaagtgctgccagtctaacacaaaatgttcttattttgttgactgtttttaaactatgtttggatcaacaattttaaatgctcacacacacccacaaacttttaaaagaagcataccagaatgtcaaccattgtttctgctacattctaggatgatggataactttcttttctatctctgtattttgtaacttttttttttttttttttaagatggagtcttgctctgtcacccaggctgcagtgcagtggcacgatctcggctcactgcaacctccacctcccgggttcaagtcccgagtagctgggactacaggcatgtgccaccacgcctagctaattttgtgtgtgtgtattattagtagagatggagtttcgccatgttggccaggctggtttcaaactcctgacctcaggtgatctgcctgccttggcctcccaaagtgctgagattacaggcgtgagccatcacgcccagccccagtggaatcattttgaagttaactaaccttaaccctaaccacaagcaggcttttctatcagccactaatggggaaacgtcaggctcaccttgaggtgtttgagcgctaggcatgcggcctgctggagccttgcgtcgttctctgccagggcgttggtgtagaacagcaaagcctggggagagtaaggaggctgtgaatggaggggtaagcagaagtggagtccatggttccgggtccatcagccaccaggtgccgacagtaaggcacgctgtgcccatctttctctaaacaacgttcaggacacgatcggtccatctttgggccctgtgtacacagtcacaagatctatactgtggtgtttaatttatccctaaaaacagatgccagggctaatacaatgaagaaagctatttttgtctaataatattccggaagtgcattctgaaactgctgtctataaaatgctgaatcagagaaatcagatgcccagctcagaacaacagaagaactgatcatcccatgtgcgttgccctcttcagctgaaaacgggcaaggctgctgccttgggccagagggaaacctgcctattcccctcagccctcctgtccaatcccagcggtgaccctgccctcttcggtctcacgaccatggccacatcagttcatgtctttgggcctaacttgactcagctgaaaacaaagctggcacttgcttcatgtgttattgtagggtttgtcagaaagcacacagggttatgcccggcccgcagtggagtccagcgtctgcggctgcaaagggaaacccaggagtgggtttgccctcactcagtcgagtggctgcaccttcaactgcacgggtggggcgatggaggggcccaggtgtagagttggctccagggacctgggcccagagccaaaagagaatggccgcctttccatctgcaggtggctctccaaagtgtctgctgctttgggaagacagactgggagtaggatcgggtcctcccgctcctcctacacagggctctggtgaaggctgtgaggccacatcggtgtggaaatgtcacactgcccactgcctctaaccccagggtcccaggtcatggcagcctactccttcctcagcaccctcatctgaggccaagcaatctgtcactgggttggcccccacctcagtgtttcctactctctaaagtctgtcacatgaagatgaaggccctttttttttttttttttgagacagagtctcacttcgttgcccagcctggggtgcagtagcacaatctcggctccctgcagcctctgcttcccatggaggccttgtttatatacccccatacccaaaaaacaaaatacacctgacttcagtggatccttgaagccaactactagttttcaggaactacagaagacagagaaatacattaaactaccgttaaacttcctgcaagcagcaaagtctagatagtctaggtcaacctgggatcgatcaaattaattgcaagcagagaaagaaacggggaaaaaaacctttagattgattggaagccatcagccaatcacaatgtgtgtccttatgtagatactattttaacaaaaaataaaacaggatgcttgaggcttggaaatttgaacataagatatatgatataaaggaattgatagttaattttttagataagataatggtgttagagttgtgatttttgaaagaattcttaaccttttgacacatatagttaactatttaaggtcaaataggatgcctcaggttgcttcaaagtgatacaggggagtggaggggaaaggggcaggattggccatgggttgatggtggttgggcttgggttatgggtgcaggtggattcattatattgctctgtctacttttgcaagttcaaaagtctccaaataaagagttaaaaacaaccacaaagtaggcggatgggctccaagaagggctattggcaatggaactggagatttcctctctagtctggagctgagaccatcagtgtagactatgcccttgatgtcacccttcctgaacccctcagggtgtggcgccttaaacgtacagtagttacaggcaaagagtgaaaaagcagagaggtccactctcttggttttcaaatggactgaacacagtgacccattaccaggtagccatgaatattaattgaaagtaaataaggatgactatcaaaacactaagaaaggctgggcgcagtggctcacgcctgtaatcccagcactttgggaagccaaggcaggcggatcgcagggtcaggagtttgagaccagcctggccaacatggtgaaaccctgtatctactaaaattacaaaaattagctgggtatggtggtgggcgcctgtaatcccagctactcaggaggctgaggcaggagaattgcttgaacccaggaggtggaggttgcaagatcgtggcactggactccagcctgggcaacagagcagaactctgtctaaacagacagacaaaaaacgcactaagaaaaacattcagcgtgcaagtgacatctcagaggcctaacagatgtgttgctttggaagcagcaaggtgcattcatgtgtgttagatcgtagcccaggtccctccatcaaaatagctcacagctactgcagcccctggcactcacttctttgtacttttccatgagaacaccagcttacctatgcccacacatctgtggccagggtctgccacctgccctggacaacgtaccttttcccggaagcttctgttcctgactgcaccagccaggcgagcgctggccgccctgcacaccctcggagtgccgtccagctggagcagcgcccaggctcttaaggtctggggcagaggctggagctggcccagccgcttcccctgcagcttccggaccaccttggcctgtcccgcacagtgaagctcctcgatgagtgtcactagaagacaggaaagaggtgggcccaggtcccctgaatgggagtttggcaggacagctgcaagtttgcttggctgctgccagtagccacagaggaacaaatcccagacccaccgggatgatcaccaaggcccagcctggactaatttcacagggagctcctggaatctccaggaaggccttttaacaaggggtcaaatatgctccataaattaataaaaccacagcccacacttccagggactctggccagccaagatcaccctcctacccagctctgacctctgttccgtgctttttaaagctgacttcccttggagctaatatcagcccccatcggctgaacgcagaatctcattaaatcggggttcccaaaagaacagttggcggggatggatgtagtggttctgaattataacctgagaaactgcatgtgacagggctccgtggatattcctctgctatgacagccacccaccccagtcttaccttccttggtgagctgggtgaagtgcttctccaggtcagagacgctctgcctctgcaggtagctgtgaaactggaaccaggtaatgatctgttcttctgggagcccagctccggggagcagcccaccacagctgaccacctgctccaggagcctgcggcacgctggccaaaggggagagtacatcaggagaaactgagacctcgaccctccacgcttctcagctgggagtagcctggtcagctaaaaggctttctgggccgggcgcagtggctcgcacctgtaaccccagcactttgggaggccaaggtgggcagatcacctgaggtcaggagttcgagaccagcctgaccaacatggtgaaaccccatctctactaaaaatacaaaattagctgggtgtggtggtgcctgcctgtttcccagcaactctggaggctgaggcaggagaatcgcttgaacccgggaggtggaggttgtagtgagccaagattgcgccactgcattccagtctgggcaaccatgagtgaaaccccatctcaaaaaaaaaaagggtttctgatggcacgagggcaggtgtccctcactgcattccctgtgctgtaggggaggagtgtgcccagctagagtcaggactgtgactccaactcaccctgagtcagaccgtgttgggttcatccccatgccctgggccccacaccacacctggatcaaaatcccggaggcagggcctgggaatatgcatgtcaacaagcagtccaggtggtgcttggaacatgactgtcacctttcacttgctccacagagaaaggcaaattctggggaagaacgcagtccagccagcatttctagataccctcgtgggcccctgcctgcctcccttcccataaggttcattctttacccgtcaggctctggtgggaggcatggaatctgtccccagaaaaatgctctggcggccgggcgcagtggctcatgcctgtaatcccagcactttgggaggccgaggcgggcgaatcacaaggtcaggagttcgagaccagcctggccaatatggcgaaaccccgtctctactaaaaatacaaaaaaagaaaattagccaagcgtggtggtgcacacctgtaatcccagctactcgggaggctgaggcagaagaatcgcttgaacccgggaggtagaggttgcagtgagccatgattgtgccacagcactatagcctgggcgacagagtgagactccatctcaaaaaaaaaaaaaaaaaaaaatgcaccggcccaccaagtttgcacgcagcttcagggctccacagactgctcagaaggccccacgtggaggccccttctcgcccggtgaaagggcggtgactcgcactgaagctgagaaagctcctccgtccgatggcatgaagacacagaggtgaagacagggctgaaatgaggccagctgtggccaccctgaaggccctggagactcaatacagcctttctgtgggaggggacgacaggacagaagggaacccacctatttccagctgtcctgggtacttccctctgactctgtgctggaaggttttcttgagctggttcagcagcgtcgtggcagggcaggacaggaccctgccaggccctgtgcaccctctccacagcttcaggcaccccttcgtccgcgaggcctgtgggatgactgaaagccccagttcagaaacctgaatggtgactcggggagagcacatgacaaggacccgaaaggtttccctccactaggacctgagggggtagggaggaggggacggtgtggcttgatgcgaggtcccttccctgcattcccatgtgacacgtgagcaactttggctctaagcatcttaccagggccaccacctgcagtccccacaacaacctgggaggggctgctgtcaccagcctctccttacagacaaggaacctggccttctgaggggaggtcccacggggcagaggcacagctgggatcacagctactgtttgacggcacattctgcaccttgaatgtggcctggggttacctcactgaaccccgtgcagtgccctcctcctatgcagatagggaagcagaggctcagagatgtgaatcatttgcctagagtcacacagctgactgaagagtgtgctgcaactccaggacttgtctcccttacctccccacaaagagtgtgtatctctgagcccagcccagccacagcctccactctgggccccgattaactctggctattaggaaggcagaagaggctccccgagctttgatcccgtccccgtgccgctcacataggcagcccctgggtggcaggcagctacttactctcttcaatggatgttgccttgccgaccttctcaaagtcaaggacagaaagtgtctccagaacgtgcttttgctgtgccacttcttccaggaggcattcctggaccagccttgataaattaggggaggccagtttctgggaagcagcccagatgctccagattagcatggaacatgcccaccgaggtcagctgttacggctgtggctcccacctgcttgtgcccatctcttctgtcccgggggcagctccctgactgtcatttggggattcccctttcaccaaggtggctgagctaatgggatgcaggctgggctgccagggaccacctttgcccccagaaggaggaccaacctgcctgaaagtgaagccaacccacattgcaaagcagaactgagagagacctagtcctgatagcatttgaacccgtgcatccagccgagcctgaagcctacctctgaggctttcagtaccatgagccgataaattttcctgttggctgagccagtttgcattagggttctggcacctataaatgagagtcaccaccaaagcctttggtttagggcttggcctgtgtaagagccacacgagtattcacccagaccctggtctgcctctcttccactggggaatagcttcagtctcacgggcttccaggatgcaggtctgtcaccccttcatgcttcccaccaccttcaagatgagcctttgcaaagaggactccaaacccctgtctgcccctccctgacaagtcccctagcccagccacctgcagcagagctttgcagacttggaggtgtaccatcagcagcacgtccagctctggggcaccggctgtgagttccctggatgacgctttcagtgatgacggtgggggcaggggccggtcctttctgagttgaattgagaactgggtgaccattccagttagcagttcagctccctctgagggtgggggaaccctcccttcccagcgagccccaggtcaggaggcccactccaggtcccaggaagttcaactgaagaggaaggggaaaggaacaaagggtggcagcaactcgaaacagagctgggaggtgtggccaagggcctggggaaggcagggcgggcagtcgtcttccaggatgtctcgtggaggtagaagagaattccaactcatcccagctctgtgacgctggacaagtctgcctccccaaggctcaggtgactcatctatcaagggaggcaggagccccacactcaaggccgtgaggggtgcatgaaatacggtgggcaagagcgcctcacaccaagtccactctgtggtagaggctagacctgctgcccgacccactcagccactcaggaagggtggaagcaagtgtggcacgaaacaccgcactcgtccgtgggattgtgagaggcgaggagaaggaattgagcctctgctcttccatgtggtgagatgcggatgcagaagccctcgggggctggggcaggtgaggctgcgtagcctcgagggaagctgtcatgagaggtgtgggccctgtggtgggacagagggaacagcactggatactgctgcaccttggttaggggctaagagctttttttttctttttctttttctttttttgagacagagtcttactttcgcccaggctgaaatgtagtggtgccatcttggctcactgcaacctccgcctcccgggtccgagtgattctcctgcctcagcctcctgagtagctgagattacaggctcttgccaccatgcccagctaatttttgtatttttagtagagacggggtttcatcatgttggccaggctggtcttgaactcctgacctcaggtaatccgcctgcctcggcctcccaaagtgttgggattacaggcgtgagccactgtgcctggcctcaaagaacttctactatatacttggtgattatttttaaggtttaaaaaataatactaaaagctggttccttggagcagaaggctcaggggcaggctggggtgatctcacccacttcgtggtctctgaggaccggctctgaggcaagtgggggatgtgcggggatggcatggggaagggtgcacgatagagtgacaagagctgagccaaggacagtgggagaaacagacggggaggctggcaggaaacgtggagctcgggtcacccggtgggagtggtggccactgggtcactgctggaaggaggtgcactcaccggagaccctgggagcccccaaacagggacagctcatccagggcgaagtcggcattgaggaaggcgaagctctccaggatgcactccatcaggctctcggccgaggtgtgctcctgccgtgctctgcagggctgtggacgaagtggccagacctgagggcaacaccgggccccacccacccgactgggacactggccaggggcctcacggcagacttgggcaatgtcccggtcccaagccccaatcccacacaccgtcccccagcagaagcccagccgctggcccaaggcgtggcactgggcgtgtcaccccccaaagtccctcctgaatggcctgtgacaaggtaggagcagaatcttgagggggacagatctgaaaaccctcccctgtatctcagacacccacggggacaaggccaatggcaggagtgagtgagctgccccagcggggaccagggaggcaggagcgcaggtgcctcccctaagagggggccacgctcatagatcgcccagttctaagaaaaccctaaaacatggatatttatgggaaactgcccagctttgaaataccaacaacaaatttcaaagtattttaaatacatggtgtaggtcaggcaaacgcttcttcacgaggctcagaggcctgtgggctccaggttcctcctccctgttgggtttctctccccaacagattaagggagagtgttggggccaccaacccgccactggtcaagtcaccagagcctccagtgccagctccctccctggagatttctgtcttgtccccaactcgtggctggctctggggctggttcctgcccccgttcccagcacaccccacccaggccttgtgtccaacacaaactgcagccaaggcacagcccaagcagaagccataaaaccaaaccaggatcctaactgcggagccaaagagaaaatcttgaggacgaagggaataacaaggctagttgcagagatcacattttccaatacaaaaatataggcatacatgtgtatgtaagtgtgtatcaatacacacatgcatgtagactgctgattctcaatagtcaaggtagttatgttctagaggccaaggcgggcagatcacttgaggtcaggagttcaagaccagcctggccaacatgatgaaactgcatctctactaaaaatacaaaaattagccgggtgtggtggcacagacctgtagcctcagctactcaggaggctgaggcaggagaattgcttgacccggggaggcggaggttgcagtgagccaagattgcaccactgcgctccagcctgagcgacagagcaagactccatctcagaaaaaaaaaaaaaaaggagggggttatgttctataaaatcacagcaaaaaaactgaatcagcaaaagctgaaccattgctcctaagggagttactgggttaggttcctgtgaacctctggtcacagcagttttatcaactcagcaatgcagaactttgtatgtgtcttttggtttaaagacaccttatttaatagctattgttggctgggtgtggtggctcacacctgtaatcccagcactctgggaggccgaggcaggtggatcacctgatgtccggagttcaagaccagcctagccaacatagtgaaaccctgtctctactaaaaatacaaaaattagccgggcatgatggtacgtgcctgtaaccccaggtactagggaggctgaggcaagagaatcacttgaacccaggaggtggaggttgcagtaagctgagatcgtgccactgcactccagcctggacaacagagtgagactccgtctccaaaaaaaaaggaaaaaaaaaagctatttttgattcattaacattgaactcaacagccagcatcgctacaactcatgcctgaaggaagctcatctaacacacattttctctgtaaggtatttcacaggcttcctggactgaggaacaccagccggcactgaagctctgggcttgggaggcatttaaacagtgaaactgtcaacaaaaagcacaaaaacttgaaaaacatggcattaaatagaccatgaggacacttgtttaccatttgggcattgaaacaggaaggcaaagcattgcctcgcttgacctcagctgggaatgtgtgctttgagcagctcagattttctatcactctgcccggccccaaaacccactttggaatcgcctcgagtattgatttgggggttagaaataaattttagcaagtaagtaaattccaaaatgcagaatccacaaataatgaggataaatcatgtatatgtatgtgtgtatgtatgcgctcacacacacacttttttttcttttgagagagagagtctcgctctgttgcccaggctggagtgcattggtgcgatcttggctcactgtaacctccgcctcccgggttcaagtgattctcctgcctcagcctcccaagtagctgggactacaggtgcacgctaccatgctcagctaattcttttgtctttttagtagaaacggggttttgccatgttggccaggctgctgttgaactcgtagcctcaagcaatccacctgccttggcctcccaaagtgctgggattacagatgtgagccactgcgcccaccatcatatacacatagatttgcataaatgtgtgtgtgtgtaatttctctccagaaagtcaaaccaaaaaccacggtctgtaatcaatttgcattgttctgacttcgtttgccaaaaaaagaaaagttccttaaagacgtttaaaatgattacattattgcggcattaacatttttatgtaaattgggtgtaatttttcaaaatacaagtatgtgacaaatgtgcatgccgactcaaattagtctacaaaaaaaggctgttaaaaagtacaaaaaaggtacaggcacgatggctcacgcctgtaatcccaacgcttcgggaggctgaggcacgaggattgcatgagtccaggagtttgagaccagcctgggcaacaaagtgagaactcgtctctataaaaaataaacaaaattagccaggcatggtgatgtgtgcctgtagcctcaactagtcaggaggctgaggggggaggatcgtgtgatcccaggaggcagaggttgcagtgagccaagattgcaccactgaactccagcctgggcaacagagtgagaccctgtctccagaaaaatgaaaaacatgaagtaccaaaaagttgacattatttcttaaatttttttctggaaattttcaggcaggtcctttttaacaaccatagtagtggtaaacggaacatattttaaagttatggatgtaaaatgagaaattaaactttttttcccctatgttgatttgtcctgttggaggtgtggttggcgataaaatgtgtttgaagagagctgttaactatttcagtgccaaagtgtatcttacacaaaagaggggaaaacagaaaacagcaaaatcagagaagtgcacagccagtctgagggcataaggaccgagggaacacagagcaggaagggatgggcctgccggggccaggtgggagttgccatttaaaagagggtgtccaggccaggtgcagtggctcacgcctgtaatcccggcactttgggaggctgaggcaggcggatcacttgaggtcaggagtttgagaccagcctggccaacatggcgaaaccccatctctactaaaaatacaaaaattagccaggcgtggtggtgtgcacctgtaatcccagctactcgggacgctgaggcaggagaaatgcttgaacctgggaggaggaggttgcagtgagccgagatggcgccgctacaactctgttgccagcctgggcaacagagcgagacttcatctcaaaaaataaatacataaaaaataaaagagcgtgttcagggaaggacacccttaagttaattgatgtattagtaggtactagtggtatacatttttttgatgtacattcaaatttgtgtaaacacgagaggagaatgtaataatttgcctaggtcagcacctctgaaagccacctgccacctaagccctcctgtgaactgagaacagccccggggtatgagccctgtggagaaggttcagtgcggggtgcgtggatgaggcaaacagggaactgtgtggggccttccatggagccagctgcgaccctgacaacactccaagtttgggtttgtagccacaagccacagccccgcccacccaggtcagaaggtgcgagatggggccagtttctggctggatgtgcatgagcctatctactgtgaactcttaaaatcttcctgagccccatgagggctgttgttatccccgcttgccagatgaggaaaccaaggcccagagagacacggcccacccaggtcacgcagaggtgaggccaggatgtcggcccaggctgcgtggccccagagcccccgactcccagtcatcatgccatcagcaaagcagggccaccgcccggggcggggtggccataccttcagccggtcccggaagccgaggacctggtactccagctcccggagctggggctgggtggagtccgtgggcctcagcaactccaggacctcctgcagaggcccctcgagggccacgccaggcccgtcctctctgtccccggttgccccttcctcgtggccgttctggctactcgaggctgtgccgctgtggaacagggagccctgtggcaggctggggctctcccctcctaagttcctccagccaggctgctctgcaaacgggcctccagagaggtgggccatctctggcaggagacctgggggcagggggtcctcccgagcctcctcttcaatggaggcgtggggaccgaaggtcaagggcaggaagcccacatctgaggtggacgccgacgtgctggtctccgtgtctcgggggtcctcagagctgaaggagtccatctcaggcagctcctgactctggcttcttaggctgggaccccggaggtcgctgtcagacaggtagctgaggatggaggtggcccttgggccacccagcagcaaggcctgctgtgttggctgctgtaggacagactggagaggggacacgggagcggcctcaccagccaccccagggaccacagcaagtcccccagaggggcttcccctgacagacacccgctgtgcatgcccatgttctcaggatgactgaggcctgccgaggtgaccagcatcccagaggtgcagaaaaaaccctgtcccctctctgcacttatcccccatcccgcctccaactcactccccccaacctcaacagcctcctggctattgctcatgccctgtgggctgggccccacgttcctgcctcagggcctttgcactgactgtgctctcgtcagaacactcttccccatgtgccttcatggcttgtgccctcgcctcctcaggaccttacataggtgtcacctctcctgagaaccctgtcctggacagccttttttaagtggcaatttctacctggccccagtgggccccttcccttcctgctgtctcccacagtccttatgcccctggggctggctgtgcacttctcggattttgatatcatctgtttcccctgtagaatttcagctccctgagggcacagtctttgcctggcctggagcagaggctggcatatagtttcggtttttgttttgttttgttttgaaatagtctcgctctgttgcccaggctggagtgcagtggcactatcttggctcactacaaccttcatctcctgggctcaagcaattctcctgcctcagcctcctgagtagctgggattacagtggcactccatgacgcctggctaatttttgtatttttagtagagacggggtttcaccatgttggccaggctggtctcaaactcctgacctcaggtgatccacccgcctcggcctctcaaagtactgggattacaggcatgagccactgcacccagcctagttttggatgaatgaagtgaatgaatgaatgaagggcctgacaaacacaccatagaaacagcagcagctgtcattaagtattctgaggttgccggccctattccagggccttcccattaccctcaccacaccccatgggggtggcactgccctaacctcggagaggtccttaggccacacgggtggtgagtacagtgccacagtgtgaatctgggtacacggacacgaacccttacctctcatcagctgaaccaatgataatggttgatgttcattaactcagttaactctcacagtaatcccataagggcagtgctgttattctcacttctctgatacagaaattgaagtccagagagggctgggcacggtggctcatgcctgtaatcccagcactttgggaggccgaggcgggtggatcacctgacgtcaggagttcaagaccagcctggctaacatggtgaaaccccgtctctactaaaaatacgaaaattagccagatgtggtggcgtgtgcctgtaatcccagctactcgggaggctgaggcaggagaatcgcttgaacctgggaggaggtggaggttgcagtgagctgacattgcgtgactgcactccagcctgggagacaagagcgaaactccgtctcaaaaaaaaaaaacaaagaaaaaaaaaggcgtatacacttgctggtagatggattgctgtctctggaagaatatggaagaaactgatgacaggagttggtattaaggaggggaccctgatccatggagatcaacaggaaagatgttttactgggcactctgtcaagtactactactagaaacgtatatattaaggccaaggccatgactggggtgctagaaccatccagagagcccactgcagatgtcctgaagaaccagccaagcccagaacccaggctaggttggaggctggcagcagaggaagaaagtgcacaggaaaacacccaggatcgcctcaaacggaagctgagcccgaggcttgccatgtctgggagggccagactgctcagcccagctcctgcgtgctgcccccatcccagggtgaccacagcggccctgccccgggaaggctcactcaccaggtagtatctctcccggaagctgggggtgctcgggggtgtccagttgtacaaggagcccttcctgctgcccatagaaaacttgcccgtggggctgggtgacaccaggaagctctcagtatcaaacgggctggaggagagaacagaaggtcaggatgccatcggcacccagaggccatttcaggcccagacggcccacagggctcttaggttatgcaggtagatggtcttcatcttacaatacaatagcatggatggtgtgtgaggagctctgctctaaactgttgcttgtttttgagacagggtcttgctgtgatgcccaggttggaatgcagtggtgccaccacagctcactgcatccttgaactcctgggttcaagcgatcctcctgcctcagcctcctgtgtagctatgaccacaggcatgtaccaccatgctggactaatttttaaatttatttttattttttgtaaagacagcgtcttgccatgttgcccaggctggtctcgaacttctgggctcaagcaatcctcctgcctcagcctcccaaagtgctgggattacaggccatgagccactgagcccagcctctactaaactctttacacaaatccttatttccacccccaagacaaccctctgtggcctggagaattatttacaggggaggaaaggaaggctctgagagatgagtgacttgcttagggcagtgtcacaaccaaccacgcgagacggaactgaattcacacacagattttctctgaccccaaagccttaaagatcactaagagtgatgcttactcttcagacatcactgtacttaatggatttaagaggaaatgggctgggtgctgtggctcacacctgtaatcccaacacttcgggaagccaaggcaggcagatgacttgagctcaggagttcgagaccagcctccataacctggcaaaacccccgtctctacaaaaaatgaatacattagctgggctaatgtggtgaccaacagacacttgtagtcccagctactcaggaggcagaggtggaaggagcacctgagcctgggaggtggaggctgcagtgagccgagatcatgccactgctctccagtctggggcaacagagcaagactctatctcaaaaaaaaagaaaaaaaaaaaaagcaaaataaaacaggaaatggaggcttgggcctccaagtccagggccttgcccatggtcacaggtgcagcctaggaactccaggttacatgacctctacccctttagaaacctttctcaaggctgggcgtggtggctcatgcctgtaatcccagcactttgggaggccaaggtgggtggatcgcctgaggtcaggagttcgagaccagcctggccaacatggcgaaaccccatctctcctaaaaacataaaaaaattagctgggcatggtggcaggcacctgtgatcccagctacttgagaggctgaggctggggaatcgcttaaatctgggaggcagatgttgcagtgagccgagattgcgccattgcactccagcctgggcgacagagcgagactctgtctcaaaaagaaaaaaagaaacctttctcagactctgaccgccctgagggcccttagccagatggtgagggacagtgactgtgagcaggagagcaggatctggaggcaggaaacctcaggtcaattcatgctaaatcaaggaaagacaccaaggtctgaagggacagggaatctaaggccaattaacgcaatcttcctaaagctaacccaaaaggaaaaaccccgtctccccacactgagtagtaaaggatcaaaggcaacgctccctacagccctcctgcctccaaccatggctcagatggaaagggagggtgtatggatgggccgctggcgaaacagggaccatccctctatctgcatagggcgccatccacctcagcctctaaccacagaccaaatcctttatccagaaaaggggcagcccataggaacctcaaacagggtacttaaagcccagaaactttgaaaccatgcccttgagccacatgctcgggcccactcccaccctgtggagtgctttcttgccttttttttttttctttttctctgagactgtcttgctctgtcacccaggctggagtgcggtggcgccatcttggctcactgcagcctccgcctccccggttcaagcgattctcctgcctcagcctcccaagtagctgaaactataggcccgtgccaccacgcctggctaatttttgtgtttttagtagagatggggtttcgccttgttggccaggctggtctcgaactcctgacctcgggtgatctgcccacctacgcctctcaaagtgctgggattataggtgtgagccaccgcgcccaacctgctttcttgctttaataaagtcctgctgcttcattcctgcgtttcattcccctgctccttttctgcattttgttcaagtctttgttcaaaatgccagggacttggacaactcattgtcaagaccctccaccagtaacaactggacacccccagttagaggcccctttgagaagctcagccgatgagcaggggacactcggttcagaccccttgtctgtaaaaggggtgcgcttacagaagaacccccatgtggaacatgcacagggaagggtgggaatccaggcgagcgcatgggagcaccgaggcaagtgatgctcagcctggcccgtgatgctcagcctggcctgtgtccagccttgcactcggagtaggtaggtccccatagatccatttgcctcgaagaaacttgcttataattatttgcacaaaggcctggctcgtggcacctgggcctggcctgaccagaaggcctagagctcagaggctctgcaagtgcccacttctctgcccagggtgtctgcagacccgcaggcaccctgggtcctaggcttggatggcactgagctgcccgccaccctgtacacttcaggggcccctgggcgaggggtattctcagccctaccagacaggtgaggaccccgagggtgcaggtggtcgctcaacagaattcacccagctcacgagggagagggcagcagctttgtgacccccagctcggacacccaccctagggagagaggagagagaccagccccgactggccagagcaagcacagagcagaggagtgtcctcagccctcccttctgctgcctctgcgctgaggaggaggaaaggaacaccctggaaatgcaaggcttccttagaacagagagctctggagccctccacgctcatgggcatgcagtccagggagtgatctcatggacatgggcttcatgggtctgcagccgagagggggacgcaggtgaccgctcagccccaggccaagggggcagccagggtcggccaggaatgagggggtgggagcagcaaggagggccttcctggagaggtgagcctcctccaaggagccaagcccgggaggccccggaaagtgtccccccaaccttccctgtggctttaatagtcaggggttcagaagcaagaagggaagcaaaaccagaaaggcaggcaggggctacagagaagttctaggcctcgacctgactgaggggtgggagtgagggacagatgaggacccgtgagggcagggacacccttggcagaggctggtgcaggaacccagggccagagtgtggccaggccaccaggggcagccagccaggcctccgctctccccaggctggacgggactcacttccactgcacctccagctgcagcttgatggtacccaactccgtgatgtccaccacgatgacctgcggccgcgtcgtgaagaagtcggcgatgtcacacgtcactgcacccacagccagcgagcccaggccccgcaactccgtcacctgggggtgggggctggagggtggtgtctgagccgaacacccaggcaccccagccctgcccccgggccccatccccaccttgatgtccaggttctcatgcagcgtggggatgaaggccttctcctcttcgtcccaggtctggctgtcatctgactcgatccgacccttgagcttccaacgctggcggcccagacgcatgagcacctgtgaaccagcccgagaggggccgcgtcagcccaggtgggtgtccccttgctgtccgcccagggccctccctgccaggcagagccccagctgcaaccctggttcccagcagctcccgtcccccaaagacctggcggggagccctgaggattgaccccagagagtggccgtacctcatagtggtctccgggacagaggcgtgcgtagcccaccaagcctggaacacagacatggccggtctcccctccgccttccactctccctgacctgggaccacaggtcctctctggggttcccccgagtatagattttcagtttcagtggggtgaggatgggggggaggtacaccatcatgatggaaaatggacagagggtgctgggccctcacaccaggctcagagaggggtgggacttgccagaagtcacatgtcacatggatgcaaaagccagggctgggctcagacccctgggattctggccaattcccgtgcccctcagcagaagtctcagggcctccagaaaggcctccgcccaccccctctcagccctgttacctttcatcctgatgtggaactcgcccaggtgaacctccagggccccctcgatgagccacatgtcctgcaaagccccggaggtggctcagctggctgcctggggctaggccacgagggcctctaaccatccctgcagccagacagaggccacaggcagagagacgcctccttggggcccagaacacctcctccagcccccactggcccagctctcgatgtccccactgcccggcccagctcttgctgcccctgctgcccagcccagcttggcccggcccacctcggcgcactcgtgcaggctgcggcccagctcctgcaggctctctcgggctgcgcggctcggggggcaccgggcgaaggcccgctgcatgctggaggcgccgtcgcgcaggcggcactggatgcagtagtcctcgtacagctcatccacctgtggtgggcacacgggctggtggcgctgcccacgcggaggggcggccccacacctgcctgtcgacttctcctctctgggagaggccctccctgagctaagcaccccgctagcccagcccatggtgacagtcactacctgtccagtcccattcaaagcagtcacccctggccccagtagaacatgaacccccataggcagggaccacatctgcctcacctgcctcacctgccaccactgcctcacctgccacccctaccacccctgcctcacctgccacccctgcctcacctgccacccctgcctcacctgccacccctgcctcccctgcctcccctgccacccctgcctcacctgccacccctgcctcacctgccacccctgcctcacctgccaccccggcctcacctgccaccccggcctcacctgccacccctgccaaccctgtctcacctgcctctcctgcctctcctgccacccctgccaaccctgtctcacctgcctctcctgcctctcctgccacccctgcctcacctgctgcatacccagctcctggcagcgactggcacacagtgtgcacagcaaaaatgagtgaaagggacaagggaatctgtcccttcacctcctctgcctggtttttcaacaatgaaatgggagatgactttgtgataacctgccacccactgggcagtgtggggagtaaagcaagatcatgaaaccgtttgcagactctaaagcttacagatctgctatgcgaccttgggccaacccatgttcatctctggacctctgcttttccaactgtacaatgggctgggagggctcaaccttcccagccatctaagactgagcatgaggtctttctgcataaactgaagaaagagcccacacagtcctcagggagtcccacctcagggctgagccccctgactcccacctcagggctgagcccctgctgtccttcaactggcccgaggcccctgctcatccttagcctcctgcagctgccccatacccagaggccctgatccctgtttcgagggcacctccccagctcctgctaacctagctgaggcccagcaagctggcactgccccaccccaccctgcaacatccacgagccagctgaccttgctgatgtgaaactccatcttccgaatgtgcctttccacacagcgcgtttgcttctcccggaaaaagggaagatgtttgcaaagttgcctgggccacccacctgccccgcttgcccctgccaccctcctacaggtcctaactcagagaatggggcccctcaccatccctgaggaaggctcatcgcagagactcagccttcccattcctaaaatggggaggagacccaggttttctgcccatcaggcagccaggaagatgcaatgaggcacagtcattctcatccagccaggcccagcccacctcactcaccgtatgcagactcaccttgtccaggtcataatagaaagcctgtgagggaggaaaggagggcggaagaagctgtcagagtcccacatgttcctccaaggcctatgaggctctatgctggcggcgcctgagctcagagtcagaggacagaaagccatgtctacagccacccccacccactccttcctctgccaacggcagactgctgtccacgccaaggacagcactgattaaacacatgcacgtgggatgaggcagttctaggtctggctcttctatttcccagctgcgtgtcccaggcaagtcattcagcctttctgggcctccgtttcctcctatgtaaagcagggtaggagaagcgcctacctcacagggagaaaaaaggacacagtaggcccttgacaaaatgggaaccattgagattgaaggaatggcctcggccatgacaaaagaacatgagggggatggaagcgggaggggcacatggcacagcagttcaggccttaatggtgaattcctaagtctatccattccaggggccagggtgcgaccaacacaaataatatatcatcagggcaggcaaacctttctataggtttgtaaagggccagagagtaaatatttcaggcttggcaggccacggcgccccatgccaagatctataaagtaggaccatcctggccaggcgcagtggctcacgcctgtaatcccagcactttgggaggctgaggtggtcagatcacttgaggtcaggagtttaagtccagcctggccaacgtggcgaaaccccatctctactaaaaatataaaaagtagctgggtgtggtggtgcatgcctgtaatcccagctacttgccagacttgaggcaggagaatcacttgaacctcagaggtggaggttgcagtgatctaagaccgtgccactgtactccagcctgggtgacagagcgagactccatctcaaaaaaaaaaaaaaaagaaaaaaagtaggaccatctaaaacatacacacctttgcctaccttagagttacttctagaaccaagaaagagtgtgaagtggacctaagacatgggaagtgctgtacctgcctgtggggttaaattcatcagggtcaaagttttgtcctaactaagcaactctgccatcatagtgggaaagcagccacagacaatatgtacatgaacaagtgtggtcaagaaacatttttttaaacaagtgtttaaaaaaactcttgttttttaagtgactctaattttaaaatatagtgactctaattttcactggctgttaatttccagtggagattagagtcactatgtctgagtctggaggggttaccatggggttgtagatccaccagggaggaaaagtaagctgtaggagagtatgtaaattgacatttcatttttgtaagacaattttaactcacaattgctaaacacatttacatgattatgtgaccagagagaaaaatatggaaagatcaataaaagattgttctcaagggttaaacgggatgggacacggaagattgaatagaggagggcgtcaatcgagaaagaaagaaggattcaaccccaaaaagtcccatgtatgtatttatgtggaattgtacatatgcgataatgaaataaaaattccatttaagccaggtgaagtggctcacacctgtaatcctagcactttgggaggccaaggcaggaggatcacctgagcccaggcattcaagaccagtctgggcaacacagcaagaccccatctctacaaaaaatttaaaaattaactgggcatggtggcacacacctgtagtcccagctacttgagaggctgaggtaagaggattgcttgagcccaggagtttgaggttacggagagctatgatcgtaccactgcacttcaccctgggtgacagagtaagaccttgtcactttaagaataaataaataaaatctttttaaaattaagaaacaattaaaactccatttaagaaataaagaaacaggatgggtgtggtggctcatgcctataatcctagccttttgggaggccgaggtgagtggatcacctgaggtcaggagttggagaccagcctggccaacatggtgaaaccccctctctactaaataaaaaatacaaaaattatcctggcatgattgtgcgcgcctgtaatcctagctactcaggaggctgaggcaggagaatcacttgaacctgggaggcagagtttgcagtgaatggagatcgtgacactggactccagcctgggtgacagagcgagaatccatcccgaaaaaaaagaaaagaaaagaaaagaaataaataaagaaagaggaaagatcccaagcctttgaaaagaagagtgactacccagcaacgtctcaaaaaccaacatcttgtttcaatgagaaccagcagtgtcatgggagcaggactcgacatgggcatcttgctgtgtggctccagtgcggtcactgtgccctggcctcagtgtgcccatctatgacatgggagcagctaaaacatacaagtatttatactcttgcctgctttagagttacttctagaatggaaagaatgggaaacgaagtccacggggtgagactcactgtacccatgtgagaagaggggcaggtgctggagctgggtgatatcttggcagcaccttctcccaccatctgctgctggtcacccgcccaactgtccactaagggtgaggcatgctgagcttggcaggcctttccctccccaagtccctggcacacacatgaggctgggtccttgcctctcctaccctgcccaccccgaggccctctctgctggagccaggatacagagacggccgcttgtttgcttgcttatttcattcattcattcattcattcattcattgaaacagagtctggctctatcgtccaggctggtgtgcagtggtacgatctcacctcactgcatcctccgcctcctgggttcaagctattctcctgcctcagcctcccgagtagctgggactacaggcacccgccaccacgcctggctaatttttgtatttttagtacagatggggtttcaccatgttggccaggctggtctcaaactcctgatctcgagtgatccacccgccttggcctcccaaagtgctgagactacaagcgtgagccactgtgctgagccactggatgctattttggtagaaaaactcatctcccctcctcgctttcccagtccctcagtcaagctggtggcctgttctgcacattggtgctttggaggagggattctgggaaacactggctgggaggagaatcccacagtagcaaggcctccttgcttttgtctccaaatctaattcattaaggacatgtggggttttctcaaggcagcagcggagagacttcccagatgaaaggaagatcctcctgctgaaaggatgaagtccctgagcaatgggatcctagcagtgtcaccagataaaatacaggacacctaattaaaattaaaatttccaatcaacaaggaacaattattttagcataagtatgtcccaaagattacatgggatatacttatacctaaacaaatttgtgatttgtctgaaaaaccaatttaatgggaggccgggcacagtggctcatgcctgtaatcccagaactttgggaggcagaggcaagcgaatcacttgaggtcaggagtttgagaccagcttggccaacgtgaaaccttgtctctactaaaaatgtgaaaaaacagctgggcgtggtggcgggtgcctgttatcccagctactcaggaggctgaggcaggacaatcgcttgaatctgggaggcagaggttgcagggagccgatatcacaccattgcactccagcctgggcaacagagtgagactccatctcaaaaacaaaacaaaacaaaacaaacaaatttaatggggcatgctatttgtgagtgtgtgtgtgtgtgtgtgtgtgtgtgtgtgtgtgtgttgctaagtcggtctctgctaagggagaggcaaaaaaccagagcaggtgagccttgggcaacacagggcccagggccagcctgaaagacactgccttggctggcacagtgcctcacacctgtaatcccagcactttgggaggccgacacaggaggattgctggagcccaggagttcaagaccagcctaggcaacatgatgagaccctgtatctacaaaaaatttaaaaaattagctgggcatggtggtgcatgcctatagtctcagttacttgggaggctgaggtaaaaggatcgtttgagcccaggaggtggaggttgcagtgagccgggattgtgccactgcactccagcctggacaacaaagggaaatcctgtctcaaaaaaaaaaaaaaaaaaaaaagacactgccctgatgatggcaggaaacgctgcctgtcagctgggcattgaaggaacacgcaggcttcatcaaggacagcggcagaggccactgtgacatacccaagatgtgacacctgacccactttcctggcattacagaagccatcccaagtccaggtcacctgatggccaaggtctataaaataggaccacctaaaagaaatgcacctccatacactgcccaccttagcattacttctagaaccgagagacagtgtgacatgggcctaaaacgtgtgaactgctgtacgtgccaaagtgaagttaactcagtgcaacgtgaagaggctattccataaacctctagttctgagaaagagtcacaccgtgacataggctagaaggaacgcagggttcatcttttactcctggccaaggctatctgggtgggaagcaggcagggaggggtctcaccagcctggaattcctcctggtgtctttgtggcgtccagacaggtggtccagctcagcctgctgcacacacagatactccctgcaaggaaagcaaggaagagtttcaaatggaagaggaagaagaaagggaaaggaagtaggccaaatggacaatgtccccacgtggagagcagacacggggctcagcggggctcagaggcaggtaggaagccaggctccctcacactgggggctgtgtgcccagcaccacacaaaattggttacagggaagttcctagttaattcccccaccaggcccacaagtagcttctactgttattatatgcattttctttctttctttacttatttattgtttgagacaaggtcccccctctctcgcccaggctggagtgcagtggtgtgatcacagctcactgcaacctctacttcctgggttcaaatgattcttatatctcagcctcttgagcagctgggactacaggtgtgtgccaccacacctggctgatttttgtatttttagtagagatggggtttcactatgttggccaggctggtctcgaactccttgacctcaggtgatctgtctgccttggcctccgaaagtgctgggattacaggggtgagctaccgcatccaacctagtatatgcattttaaagatagacaaaccaacccttgaaagcagcaagtaccccagccccggtcacacagcagagaagaggctgaacccacgtctgaaaccacacagtggccttctgagcccaaaatcttcatccccatgttataccccctcccaagctggggcccagctcatggggaggtcatcatggcacacctccctcaaggtcaagggtctaggccgggcgccgtggctgacgcctgtaatcctaacactttgggaggccgaggtgggcggatcacaaggtcaggtaatcgagaccatcctggctaacacagtgaaaccccatctctcctaaaaatacaaaaacttagccgggcatggtggcacacacctgtagtcccagctactcgggaggctgaagcaggagaattgcttgaacctgggaggcagaggttgcagtgagccgagattgcaccactgcaccccacctgggcaacagagcgagacttcattccaaaacaaagaaggtggggggcgtctagatttgggggccaaggcagggagtcccatcttgctggatttgctgagtcatcccaggaaggtcactcacactctctgggctctactgacaccacctcaaatgtggaaaagatagcttctgccagactgctactcactgaggtattgagctctctgggaagaaggggctgccttggccccagacaagtctcaaacatgtggtccttaaaggacacagaatctgtccttcagaaacatgctctatcgtccatgcacatcccagctcccactctgcacaatcccagcttgctgcagcctccacctctacaggattttgccatattcccatgctggtcttgaactcctaggctcaaggaatctgcctgcctcggccccccaaagtgctgggattacagggtagccaccgctgtgcccagccaaggatgtctattttgaaaaccatttcattctaaggtggtttccctttttttttttttttttttttgagtcttgctctgtctcctaggctggagtgcaataacgcgatcttggctcaccacaacccccacctcccgggttcaagtgattctcctgcctcagcctcccgagtagctgggattgcaggcatgccccaccacgccggctaattttgtatttttagtagagacggggtttcaccatgttggccacgctggtctcaaactcctgaattcgtgatccgcctgcctccgcctcccaaagtgctaagattacaggcccactgcgtctggcctggtttcaacttttacttgactctggttcctctttggggtgccccatctataaataagagatgtaggggctgggcgtggtggcttatgcctgtaatcccagcactttgggaagccaaagcaggtggatcacaaggtcaggagttcaagaccatcctgaccaatatggtgaaaccacgttctattaaaaatacaaaaacaaattagccgggcgtggtggcagatgcctgtagtcccagctcctcagaagtctgaggcaggagaatagcttgaacccaggaggcagaggttgcggtgagctgagtgagatcacaccaccgcactccagcctgggtgacagagtgagactccgtctcaaaaaaaaaaaaaaaaaaaaaaaaaaaaaaaggcgtaagtaggagagaatttagggtctaagtaccactatatctggggaaaatcactccagaaaccactctttggcccacagggccccctgtcatctggtccccattgccccataacctcatcctctttcctttggctctagccacgctggcctccttgctgcgccccagggcctttgtgtatgtggctaccctggcctggaatgttcttttccccttcaggagtgtgctccaatgtcaccttcttagcaaggccttccttccaactgcccaacttaaaatgaaccctccctgcctctgcctgcttaccctggcctgttttcctctgtggcccttactaccatctgatattctctgtacttttcttttctgtattgtgtattgtctgtctctcccccactaggagtcagctccacaggaggtagggattttgtgtgtttagtttacttctgtcccctggcctggcactctgtaagcccaataaatatttgtgggctgggcacagtggcttatgtctgtaatcccagcactttgggaggccaaggcaggcagatcacttgagtcaggagttcaagaccagcctggccaacatggcgaaacccagtctctactaaaaatacaaaatattggctgggcgcggtagctcacacctgtaatctcagcactctgggaggccgagatggacagatcacctgaggtcaggagttcgagaccagcctggccaacgtggtgaaaccctatctctactaaaaatacaaaaaattagccaggcgtggtggcaggtgcctgtaatcccagctactcggtaggctgaggcaagagctactctcagcctctgctttctcatctgtaaaataaggaggctatgccaggtgcagtggctcacgcttgaacccaggaggcggaggttgcagtgagctgagatcacaccattgcactccagcctgggcaacaagagcaaaactccgtctcaaaaaaagaaaaaaaaaaattagccaggtgtgatggtgcgtacctgcagtcccagctagttgggaggctgaggcaggagaattgcttgaacccaagaggcagaggttgcagtgagctgagattgtgccactgcacttgagcctgggcaacagagcgagactccatctcaaaaaaaaaaaaaaaaaaaatttgtggagtgactcatccttcttgtgcaggcctcggcccagctcatcagttggtctctgagcaagtctgtccttcactcaaacacccaccgccctgacctcttgcgtgtgtgggctcacagtgcaggctcctactgtggggcctttgcccacactgttgcctgtctgccgaggccctcgacgcactgtctctctgttacctttcttcattgcactcagcacaggtggaagttctatgattgattgcattgcttcttgattgattgcattgaatctgcccctctgcagtgcgtgctccacaagatcagagtcctcctgccttagtcactgccaggtttccagtgcccaaggaccgggctgagcacgcggctgcaccctgacatacttgcttactaaacgaatgaccaggaacttaacctgtcacctcttgtagacaagacccatccacgcttccccaggaagagacagagaggaggcgaggtagaggaatgcacttcttaaaggcagcacacagcccagccttacttgaggcctcttttcaatgcttcgaagatcttcttcacctgctggggcttcgggtctgcacagaccgaccccttccgcagcgtgccgtacatcttggaggattttgcaggcattcgcgatctcacggagttcctgttgatggactttctgtgagaagggttggagggcaagagaagtcagagaagggccctgacaaagccctccccaggggcaggcactttggaaatagtgaccagagccacagggagtcaggagacccggctcagtcccacccccatcaccaccaagcagtgtggtttccagaaagttatggagcctctctgggtctctgctttctcatctgtaaaattaggatcctgggccaggtgcggtggctcacacttgtaatcccagcacttcgggaagctgaggtgggtggatcacctgagatcaggggttcaagaccagtctggccaacatggcgaaaccctgtctctactaaaaatacaaaaattagccggatgtggtggtacgtgcctgtaatcccacttactccggaggctgaggcacaagaatcgcttgaacccgggaggtggaggtttcagtgagccgagattgcatcactgcactccaacctgggtgacagagtgagactcagtcttaaaaataaataaataaataaataaataaataaataaataaataaataaataaaaataaggagcctagatttgaggattaaaagaagagtaataaagcttttccaccatggctgccactggagagcagcagccatggctctgcgctaccctatggccatgggcctcaacaagggccacaaggtgaccaagaacgtgagcaagcccaggcacagccgctgcagtgggtgtctgaccaaatacactgagtttgtgcgggacatgatccgggaggtgtgtggctttgccctgtacaagcagcatgctatggagttactgaaggtctccaaggacaaacaggccctcaagttcatcaaggaaagggtggggacacacatccacgccaagaggaagcaggaggagccgagccaatgtcctggccgccatgaggaaagccactgccaggaaagactgagccccctcccctgccctctcccggaaatatagaacagcttgacaaaaaaaaaaaaaagaacagtaataaaaatctggtatcagaaatgaacttacaggaagaaatacagtcaagtagcccaaatgccaatgctctctgatcaccatgctctgcctgtgcaggcaatgccgtgtgggaggccaagtcatagtcctgtgctttacccttggggcagcatctgttggctttacctgcccagcatccatcccctccctctagtagtagcacctcaattttcctctggggcacctccccagctctgctttttatacttgtggtttgggggaaaggtagcctgactaatcaacatgcacacacacatttgcacatgcacacatgcacacgggattgtttggcaaatccacattccaggcctgcgttagtcaacatattctgctcccctgggccaagaagtatggggatcaagcctggccagtagccagccaggagttcagaattcacagaagggagaagtgttttttcccctggcattgctaacctggggaacatatacctgggacttccagcctcctccttttgccaccatgtagggaaactggggccaacacagagaggaacaaacagagtcagaccaaatctccatgacagtgagttcctggatctagctatgtctaaagctgaacctgcccgtggactttgcagttacatgagccaactggctctcttttttagcttaagccagctggagttgggagtgtggactggatgatcctaaaaactgcctttcagtggtgatggctgggtccctcaacatttagagatgtagcagcatctcaagactgattataggagtacgaggccagggcaccctcatcacagcacagagctggtttccctggcatctaagcctcttctcaggatcccataacttatccatgaggctggctgatgcagcctttgctcaccaacagatgtgttgaattctgctcttagccctctaaagccatcagccaggcgccctggcaccaggcatcacttaatgacaacattctcacaaaagagacatggtggaaatgactcttagatctaactttggcatcagttctctttttttttttttttttgagatggagtctcactgtcacccagcctggagtgcaatggtgcaatctcggctcactgcaacctccacctcctgggttcaagcgattctcctgcctcagcctcccaagtagctgagattacaggcatgcaccaccatacctggataatttttgtatttttagtagagacagggtttcaccatgttgtccaggctggtctcgaactcctgacctcaaatgatccacctgcctcagcctcccaaagtactaggattacaggtgtgagccaccgtgcctggctcagcatcagttattataggggactactggcccttctcttccaactcctcctcttcccaggggcgggaataacggtatgctggaagcagcttcaacccacccctaaaagctggctgaacaacaagagagaaggaacaggccctgaatagcctcgtgaagcagacctcccaacacacacacatgccctcatccaccccttggctctggactgcagagagagagagagaggaataaccaatctcaagtaagcacctgcattttgggggtccttttatcaaagcaacttcacctctacattaacaacacactacccaaggctctgtcttttcactggtaaaatgggaccacgtaatacatcagaggatggtgctgagaattctattagatgccaggcccaaaatgtggcacaaaggagaccttttacatgcaagctgttgttagaatcatcacatcctatctgtatctttcccctggctcacagcttagaaaacattaggtgcaggccaggcactgtggctcacacctataatcccagcacttcgggaggccaaggtgggtggatcaactgaggtcaggagttcaagaccagcctgaccaacctggtgaaaccccgtctctactaaacaaaaaattagccaggcgtggtggtggacacctgtaatcccagctactcgggaggctgaggcaggagaatcacttgaaccgggaggcagaggttgcagtgagccgagatcatgccacttcactccagcctgggcagcaagagcaaaactctgccttaaaaaaaaaaaaaaaaaaagaaaaaaaagaaaatattaggagtttggtaaatattaagctcagctgaacgggggaaaatacagtatcccaaggggattagagaacagagaacctggcccctgcaggcagagcgggatagcgagtgcacccctgggtgttcccagctggagacagagggagcaaaggtggagaatgggacctggtatgctctgggagtggatgcaaggagcaaggtttgacccaggcagaagtgggagtctgcagaggggcctggacctggggcctctctagttttggggacccaggatgtgtgagaggaggagaagggcagctcccagagaaagtccagcttccaacacctttacaatgacaagtaatgtctctgtagagcagagaaactaagctcaggccagggctagtgggctgctgaacagctgacaccacaagcccaagggcctcaggagcctggtgagaacacgtgagcctaagtaactgggggcacctgctgccgccaggagctcgctaagggctttatagaaatatctcgactttcacaaccaccctaggagacaggtattattcttattattattttgagatgaaatttcgctctgtcgacaggctggagtgcagtggcacgatctctgctcactgcaacctccgcctcccaggttcaagcgattctcctgcctcagcctacccagtagctgggattacaggcatctgctaccacgtccagtaatttttgttttttttagtagagacagggcttcaccttgttggccaggctggtcttgaactcctgacctcaggtgatctgcccgccttggcctcccaaagtactgggattgcaggcatgagccactgcacccagccatttgtatatatttaatgttaagtgatgctttccaaagcccacaggggctgtgctccctcttccccttgccctccctgaggccccatcacccacctcttgaaccgggccctccgcaagtttgccatcttgaggctggcagagacggtcagggctgcagactcgggaaaaggcaggtttctgagaggttagggaccccggcaggtgggcagcaggcagtggggcaggagctcgctcactcccagctcctgcctccagcccccaacaggtgtgcaccgttggcccagccccgcttccatccacctggggaccttataccctcgctgctgcagccacacctggatgcacctgctcccgggaaagctctgagcctagtgctccttgtgtgaggtttaacaggacaggctcagtggccactctgagagcccgcccacccggggaaggtgatgcacatgcagcctccagatggccaaatcaggcagcatgtctggcccaggtgtcacagaagccggggcaggaagagcctctggggccggatgtttcaccaggtctgggaggactcagtaaatattaaacagcccctggcatgccagacaagcttccagacgggcacgtgcaacctgccggccccagccctcacgtgaggttgctacagcagtccttctgcctggtgtggttggcagaggccttggtactcggctgttgcaagtgcaggctctggaggcagacagggccgggctcaagtcctgcacctgcccccagcctccaggcgggacaattataggactgactgcacaggcttcaggtgaagactccatgcaacaaggacgtgagccaaccatttacccaggtgcctggcggtgctggccactgggtgatgatgacaggcatgcactcggcacttgccaagctcaaattctgctctcagtgcttttgttttttttttttttaattgagacaaggtcttgctctgtctcccaggctggaatgcagtagcgtgatctcagctcactgtagcctccgcctcctgggctcaagtgatcctcccacctcagcctcctgagtagctgggaccacaggagtgcacaattacactcggctaattttttgtagttttggtggagacagggtttcaccatgttgcccaggctggtcttgaattcctgagctcaagtgatccgcctgccttggcctcccaaagtgctgggattgcaggcgtgagccaccacgcccgcctggcctgctcttggtgctttacatgtatggactcatttctcctgacacagtctttgaggtcaggccccctggtaccgtccaggaaactgaacttgcatcactcgcctctggctccagagtctgtgtgcttgacagcttcacaggcagggctggatatgagccgcctctttctccagcctcctctccttgaaacttaatggctgctatttcgttttcacacccacacttcttagccatcccaacagaggaattcccaagctgaggaggatgtcccagtggctcctggctcggggagtacctgcctgactgcctgggggagggagacctggctgaggaggggcaggaaagggggaagggcaaccatgcctgtcaactggggcagagtaggacagtatcggggcctggccctctcctccttcatcctcactgtttatcctctcatctctctatcctcccaccccccaggtccagctcttgggaaatggccttattatgtcaatcattcacaccttagtataaaatttccccaccaggttacttccccaagtgagccatctgactgtggagtaaaaatccctgtctatagtgaaaggggtttcaaggtgccagagtaggggtcaaggtggtgatgggaagagaaggggcatcagcccaccctctccatgcagagccctgccctcctgccaggttgtttgccttgacagtgcggctgcgcttcggcctgctcgggttaccagggaacaaggccagaaggtggggcctgaaacccaatcaggctccagccctggctccaagggttcagaccccagggagctcgacggagacaggaagttaaaaatagatgcaccgcttccccgtcggtgtgggcagcttcttccttgccctcacacaagggggcggcagaggccaaggccaggtgggggctgcccagggacctccgaaccagcccaggcccagcatcctctggcatccttgacaatcagatgggggacaggaggggtctgagatattagagccatcagggctgtctttcctagactaggacttggacactgtgggacccttgctgacggccagcgagccctggtgtcaaggggatggatcacctctgtcctccttcctcccaaagagctgatcccaggaatccaggaaggggccaacgagaggcagaggcctaccgtgggggcactctctgggcagagctcccctctagggcctgaggggacatgtcccatggatgcaggacattcagaggcccccacaggcctggcaggaggagagctgcaggcagggccagttgtgaaatttgtggggtctagtgcgaaataaaaatgcaaggctctttattcaaaatttatcaagaattttgggccaggcgcggtggctcacgtctgtaatcccagcagtttgggaggccgaggtgggtggatcacctgaagtcaggagttccagaccagcctggccaacatggtgaaaccctgtctctactaaaaattagctgggcatggtggcacatgcctgtgatcccagctactcgggaggctgaggcaggagaatcacttgaacccggcaagtggaggttatggtgagctgagattgtgccattgcactccagcctgggcaacaagagcaaaagtccgtctcaagaaaaaaaaaaaaaaaaatagccagtgtggtggcccatgcctgtagtcccagctactcaggaggctgaggcagaagaattgcttgaacctggaaggtggagcttgcagtgagcctaaattgcaccactgcacacctgggtgacagagcaagactctgtctcaaaacacacacaaaaaaattgtattaagaatttctatttggtgccaggcacagtggctcacacctgtaatcccagcattctgggaggccgaggcaggtggatcacctgaggtcaggagttcgagaccagcctgaccaatatggtgaaaccctgtctctactaaaaatacaaaaaaaaaaaaaaattaactggcatggtgaggcacacctgtaatcccagctactcaggaggctgagacaggagaattgcttgaactcaggaggcggaggttgcagtgagccgagaatatgccactgcactccagcctgggcaacagagcgagactctgtctcaaaagaaaaaaaaaaatacaaaaattagccgggcgtggtggcacgctcctgtaatcccagctactcaggaggctgaggcaggagaatcacttgaacctgggaggcggaggttgcagtgagccaagatcgcgccattgcactccagcccgggcgagagagagaaactgtctcaaaaaaaaaaaaattttgggaggctggggtgggaggatcatttgaaccaaggaggtcaatgctgcagtgaatcgagatcgcaccactgcactacaacctgggcgacagaatgacacccacaaaaatttctagagcacaacagcagagcgttcaatcaaagtacagagcacaggctacacgctcatgaagccgcccttgggtacagggtctgcagaccctacccctccttccagaccacacaagggtccctacagtgcttcagtggaccagccccactccagggcacacagctgggagagggtcacctgggccggatggccccctggccaggtaacccgcacagctgaccttcccagccttgattacagacccctgcaagaaagtgggggactctgataaagcccaggaagaggcagctcagaaatggttaagttgagaaacagcatcatttcctggccggtttatacttaaccccctctttgcagcacttatggagtgcctgctgtgtgcctttctcaggcagcacccactctttctgttctctgaggcttggagttggggcactgagcactaactgctctggagcctgggtcaaattcttctcgtcttggggcatcaacttaaacccttcccaggctcccctccactgagaatgtgtctcaaggcctcactgcagcccatgaggctccgcagggtcctcctccctccctgactgctgtcacgcatgccagccgcacacctgctttctgtcccttaaagctcattcccacccaggacatctgcactcgcagctgcctcccgccgccgaaggcttcccggcccacccccatctgcacacgcgcagatccacttcttctgtcccttcctgcctccactccccatgcccctgtctcgtcaggctctcccaggagaccatgggtgccctcccccacccccagttcagttccctcacagcactgccaccagctggatctgtctcaattatcactggcttattgtttgctgccatcagctcccaggacagcagggcctgggtctgtccccagagcccaggacagggccagagtaggtgctccgtgaatatctgctgcgtgaacagggattcctaaggtgcttccagctgggacactccaggatcttaaccctggggtcccggcaccaccacccatgggaagggagcccccagggaaaggttagtgagctgggagggctgacctcaggggggtggaggtggggtcctatccccgcagcaaatgcccctgggaaggagctcagggagcacacacaggagggacctggcctggtctggagctcaggggtcctcccccaggacctagcaggaagccaatgcctgcaggtgattcaacgggaactggaggtggaggagtggggtaggagctccagcgggaggacacacatgtgctgaggccctgaggccgggaggggagggaggtaggctgctggggccaggtcccaggggcctctagccaggagggcgctgggtttattctaagtaggttgggaatctttgcagggtttcaagtcggggaagagcatggtgggattttattgttgactgactcactgacctactgagttctgcactctgctctggctggggaccccgacctgtccaccccgttggctcagacagacagaggtttggccccttcaggatgtcgataaactgccccagtccccaggcctgcctgctcgtaaatggttccctgggggcttgcacagtgcctggcatgaggccctggagcgagggggcagcaggcctgagctcatcgggctgtggcctccagaagcagaaacaaccttcctcccagggacttagtacctaaagccggaggagacacaggacggggcagcaggcagggcctggcccggccagcacccccagggaactcagccacagggtcaatgctgccccccaggcccatctgtgccaagcctgctccctcatccggtaaccccccacagcaccagctgcaccggctgctggccctgcctccctcgtggttccttcccgacagccccgtgagcagggtgcacccacaattcccattgttcagatgaagacaaggctgaagaggtgaggtcacttgccccaggtcacagagccagaagaggtggccccattgcctagtcttccagacaggaagaacattccttcccaaccccgcccgtggaagacccaaccctgggccagttttgctgtgtgaccttgggccagtggctccacctatctgagcctctggttttttggtttttcttttttggtgtttttgtgggtttttttgagatggcatcttgctctgtcacccaggctggagtgcagtggtgtgatctcggtacactgcaacctccacctcctgggttcaaataatcctcccacctcagctttccaagtagctgggattacaggcatgtgccaccacatccaactaatttttgcatttttagtagagacagggcttcaccgtgttggccagggtggtctccaacttctgacctcaagtgatccgcccgccttggactcccaaagtgctaggattacaggcatgagccaccgtgcccagcccaattttctggtttttcaaaaaaatttttgtagagattgggttgtgctatgttgcccaggctggtcttgagttcctgggctcaagtgatcctcctgcctcggcctcccaaagtgctgggattataggcgtgagtcactgtgcccagccagagcctcagattttttatctgccaagtggacctgctaagctcaggcagatcaacttctggagactttgaaatgataactgttcaggtttcaaggaaatgataggtttatcccaacactaagaaactctgtctctctgtctctctctcaatctcaatctctctctctctctctctctctctctctgtctctctcgggctgcaagccggcctgagagtgggccttcgggtctctggcagcaggaggaggatgaccctgcccttccccagcccattaacaagccccacccctgcaccccgaaacaggacacggggggaacttacgcgatcctccggctctgtgcactgctgaagcctgcgaaggaggcgctccggcccacgacccccacggcccctgtgtccccaggggacaggaaccgcaacctcaccgacatggtggtcacctgcaaggagaggacaggagagtcagcctggcatcaccatccagcgagtgccgtccgcaggccagccaccttccaccaacacctacagacctcacaatggccccagagtgttgtgggggctggtactgtgcccagctcacaggtcagcaagctgaggtcccatgaggttaggggacctgatgggggacagtgatgggaatggaattcgaacccaggtgtctgtactctgcactctgtgctcaggtccttagtgccgggcaatgctgcctcccagagcaaggggacagcacctcctgaacacagccctctcaccccccgagcttctcctctcccctcctccagccctccctgagcacctaacacaggtgaactctgcaaggcaggccaagtccccccatcctcaagggctccagcccagcagggaggcccacctactgccgaacagttacgatacagagtccatgctggagttatgggggtcccagggggaatctgacccagccatgaagaggcgcccaagagctgagtaggaaggctgacgtggggtgaaggggaagggtgtctaaggccgagggaacagcctgggcaaaggccaggatgcatgaggggacttggtgtcatccagaaacagcaagaagctcagtgggctaaagacgaggtcagagaggccggcagggctcaggtcccaagaggcattggtagccccaagcaggggcttggccttacaatggggcaagggtgactgggagccatgggagggctttcagcagggggtggaaaagtccaattcacatgaagccagactgctggtgtcaagggctgcttccaccccgatccattgcccagtctccgacccgccctgcaatggggccaaccccgagccctggctgtcttctcttttttccaaaccatctctagattgagaaaatgccaccctatcccttgggaatataggtcagcatcttccagcaagggcagctggaaagttctgcttcatatctaacctaaatctctgctgctacagtttcatactttgctcctttgccagggtggtgtcaatccaaggattccagggaccccattgcccagacaaaacctacgaaaaagctccagtccacctcatcttcctgcacgatgagacccccatgttccaacatctctttcccccaggggccaagtccaccccactacacctctgctcacttgggggtctctgcctggaaaaacttcctgtatcgagccacatctgcccagcatctactactgcacctcctggcagatctgtgcagcctccacaagcctcctcctcccatatatcccccaccccacagccccacatgtgccgtacataggaaagcttggcaacaaagaaggtggacctgggctcaaatcccaactgtgccactcaggctctgggcctcagtgatcacaagagtaaaaggggaattcagaaagaacctcccacggagactgctggaaggaccaaggaaagcatgtcccgagagcccacagtgtgcaagagacatgtcggaagagctggctgtctctgtgcaattggctaagaccccagctctgcaggtgagccaggtgacccagataagccaggtgacccagggagagccaagtgagaagtgagcggcttctagcccggatggaggaaggtggcaagcatttgctgaccactcgctgtgtggcaagcctggtgccccatgagtggctacgaatccatgaacagctatgaacccatgcccagcagtgctgtgtacagatggggaagttgaggcatcattcatcaagtgctcattactaagctggccctgcactaaatgctttatgtaaattatgaaatccatacaaccctcttaagagcaggagcttttgatgatctaattccatagatgaggaaactgaggctcagagaggtgatgagactagcccaggagccccagcagggcacctgagcactgggtttagaacccgaggatgcccgatgtcagagcttgtcttacctgcggtcaggagagccttgcactggggccttgcccctgcccccataaagaggtcccctacagtcccctcctgtgctgtgctgagccagcttgtaccagctcccaacagtcaactgggccaggcacagtggctcacacctgtaatcctagcactttgggaggccgaagcaggcagattgcctgagctcaggagttcaagaccagcctgggctacatggtgaagccccgtctactaaaatacaaaaaattagccaggcttggtggcaggcgcctgtaatcccagctactcgggaggctgaggcaggagaatcacttgaacctgggaggtggaggttgcagtgagctgagatcatgccactgcactccagcctgggcaacagagcaagactctgactaaaaaaaacaaaaaacaaaaaacaaaaaatagtcaattgttaaatgttcaggaattttgtgagcctgttgacatcacgttggtggtttgaaatcagccacagtaaacgtatttacaccacagaaagcggcaagttctacaagttagggtttctgtctgctggttgttaaacacgtatgagctcctcactgctgttacccctatcagcacctatgcagggcctgagaagctgctcaaactgcttgatccccccagccaagccaggcaagagaataaggacggagtagggagggattcccaaaggtgagtagttgagacgtactccggagccagcctgggcactggagccggaaggggcttccccggcccctccctctgcaccttcccatcagaagccttctgggccgttcctggagcttcaccccagtcactccacttcaaggtcagagagaaggacaattgctaagcagttcctcccgatgcaaagctcaaaacaagccccaggtcctcctgctcagtgtgagagagaggacgacgaaggagggaaactaaggctcggagcagacctgcagaacctgacagcggattcatcactcatagcactgtgaggttcaatggccccatttttcatatgaggaaagaaaggctctgagaggtgagaggcgactcagggacacacatatttctttctttatttccttttccttctttctttcttttcttttttttttttttttttttagacagggtctgactctattgcccaggctggcgtgcagtgacacgatctcagctcactgcaacctccacctgctgggctcaagccatcctcccacatcagcctttcacgtggctgggactacaggcacacaccaccattcccagctaatttttgtattcattgtagagatagggtttcgccatgttgtccaggctgttctcgaactcctgagctcaagcgatccacccacctcagcttcccaaagtgctaggattatagccgtgagccaccgcgcctgaccaggacactcatttttcaaactgaagtctggctcttccttcttccacgtgccatggccacatggattggcttcctggctaaaccctcctcatctttcagcccagatgtcccctcccccaggaagccttcctggacacctccccactcctagctgtgtctggtgtttcctctggatgcccctgacctcctctgttatagtggactgtgaatggtgacttgtctatctctccatcctagacagggagctccctgcaggcagggaccaggtgcatggaagattcataacacatctttattgaaccagaaaacaatgaaggaaaggttgacgctgcttcccctacttcaccaggctgtgcagcccaagaggaaggtgctggaataataacagtaatactaatactaataaccactatgtgctagactctaaggcaaagatggacaaatgttttctgtaaaaagccagatagaaaggctgagcgcagtggctcacacctgtaatcccagtactttgggaggccaaggtgggtggatcacctgaggtcaagaattcaagatcagcctggacaacatggtgaaaccctgtctctactaaaaacacaaaaattagccgggcgtggtggcgcatgcctgtagtcccagctactctggaggctgaggcaggagaatcacctgaatccgggaggcagaggttgcagtgagccgagatcaagccactaaactccagcctggacaacagagctagactccatctcaaaaacaaacaaacaaacaaaaagccagatagtagatatttttggtttttcaggccatacagtttttgtcacaactactcagttctagcattttagagcaaaaccagctgcagacattatgtaaaggaattatgccatggctgtgtttcagtaaaactttatttacaaaagctgcagcagctgttgaggatgatgggtggccctgcctctgacccttgggtagccagcactgcctgctacctgctctgaggacttaaaattctcatttcattctcccaacaccatatgagacaagtactattactatccccattttgcagataaggaaaccgaggctcatgccaggcgtggcgactcacgcctataattccagcactttgagaggctgagatgggcggatcacttgagcccaggagttcgagaccagcctgggtctcatagtgagacccggtccccacaaaaaatacaaaaattacccagatgtggtggcgtgcacctgtagtcgagctactgcggcaggctgaggtgggaggatcattagagacctcccagcaagtcgaggctgcagtgagctgagactgcaccactccagcctggctaacacagtgagaccctgtctcaaaagaaggaaaggaaggaaagaaggaaaggaaaaaggaaaggaagaaaagaaggaaaccgaggctcagagaggacggaaatgagtcctccgaggtcacacaggtaggaaatgccagagctgaaactggaccggggcgcgctggactccaaagcctggcttcgggactccgctgtgcttgctcccgcagctctgctgaggacacgcccccctcccaggagccagacctcctccagcggggaagaggccccagaatggaaataggattgggagggggacctgccaagctagaaagatagccctgggtggtggccgagaaaaatcaagcccaacctcttttggcttcagggtgttgcagccccagcccctgtgggcccccttggggcctgcggaccgcgacagttcccaggcagctcagctgcgccccctcccggctgggcctggtggggctgatccatgacgttgacttggagtccagccaagcagtgtttcttgtggtaaaagaaacagacctccccctggatgattggggatgggatggccaggctgagacccacaatctcaggagccttcagcggacagctcctgacaagtccagtttgtcacctgcgaccaagggtgacattcctgatgtttaagcaatggcacagcagcaaatggaggctgggtgctggagcagggtcttgaagaccctgtcccctcccaccatgtgtcaccacccctgctggggctggcattaaccctttagctactggattgtgggcaggtctaggaggtccctggggaggcatcaggaagagaggaggaatgctcgggtggcttagggcagccctgggtaaccagcactctgcaggcatgagagacagtgcagagaccctgctgggccccagggcagagaagggaggcacagagtcatgcagttcccaaacctttggtggcagacaggacagcctcttctactccgtgtccctcgctgcctctctctggcctggcacttagaactgatgccgttcagacccggctggtgtgtgcagggagaggaagccagatgctcccagacactggggactgtcctgggcctccgtccccaaggtgtggctggaggaagcagagtctactcccgctaagtctgtccgctcactgctggccaaagctgccctgcgtctcctccccaccgccagccagagggaacctgcaatttcacctcatttagaggtaaaacatctaaatttaacgttatgggcttttggggctgggtggcttttatgcctgagtccctcacttagggctcctttttatccactcaaatgccagctagggcttagtttgtttataggagtttccaaaatagctcctttggtttcgcatgaaaggaaatggcaaaatagcccaggaagaggaatgtgagtttacacagaagacagacaggcgcccgaggaggcttctctgggaaccagttcgcctgtaccagagggggcccgagaaagtgtggagtccaacagtccaactcgctcattttaccgatgtcaagactaagcccaggatggtcacacaacttgcctggaccacccaaaggcgactggaagagccagaagaacccaaactactcctccctgccaaagcacaggcctcagctggagcccccctccagcctttgccctggctgtgtcctctgcctggcacacgcctcccttcccccaggtcttccctatcactctctcccagcttgcaggcctcacaaccaaggccacctcctcagagaggtcctccctgacccccttggctaacgtggacttgcccctcacccgtatccttcaaataactcatggttctgattgtcttattcatcagttaatcaagtatgcttctcaagaatcttcgctccagggagcagggggtttttctgtctttttaaaaaaaagtttttggggccaggcacactcctataattatgggctcacgcctgtaatcccagcactttgggaggctgagtctggtggatcacctgaggtcaggagttcaagatcagcctggccaacatggtgaaaccccatctgtactaaaaatacaaaaattagccaggcgtagtggcgggctcctgtaatcccagctactcaggaggctgaagcgggagaattgcttgaacccaggaagcggaggttgcagttagctgagatcacaccgttgcactccagcctgggtgataaagcaagacttcgtctcaaaaaaaaatttttttaaataaataaatacataaattattattattattatttttatagagatgggtcttgttatgtcacccaggctggtctcaaactcctggcctcaagcgatccacatggtgtgagccaccatgcccagcctgctggtttttaaagagcatatttaaatgaaaagagacaaatttaaaggacccttggtttaaatagagcaggttggaaccagcttcagggcagcccatggtcctggctctgccatcctccagaaccacctggagccaggaggggacacccaaggtgtctctgcagaggacagcggcctgacggatagacacacaatgagtgccctgatttgtgatttaagagaagaacaagcagctccttgggaagccccagtgtcccctgcgctccactgtcccaggactgcaggcaaagggacgcctcctgaccgcagaatagtcaacagcaggcacgggagtgaggaccgggatccagggaggccgcttccctctgtctatcagtctgcagccctgggtcccagctcactccattggggttttcccagataaagatgactcatgaatttctttgaattatccagagggcattttaattcaaatggccccatcactgcctcgtcaccactcccaccagccatgccaggggtcagccaggggtcaccttgaagacaaagcctctctttgggaaagaagcctttgaggccactgtggggtggctgtgtgtcggggcgccaggtgggaaggcagctggggcctgcccaggctagggaagagagcgtgggggtgtgggggatgaaggaagataaagatggggtagcgggagggagcgggggaagctgggcctccaagaagcacaggctgacttgggaatcccatctcaaacgtgcctcaccctggtctccagctgtaggagcagtgataaggatgaggacaggcaggagggactgagatgagatgagagcatttggagcctggagagagacccctgacactgagggagtgaggtgacctggtggtggctattccaggccaagcacctttgttcaactgtcaaaaactagaaacaggccgggcgcagtggctcatgcctataatcccagcactttgggaggccaaggtgggtggataacttgaggtcaggagtttgaaaccagcctggtcaacatggtgaaaccccatctctactaaaaacacagaaattagccaggtgtcgtggtgcatgcctgtaatcccagctactcgggaagctgaggcaggagaattgcttgaacccaggtggcagaggttgcagtgagccaagattatgccactgcactctagcctgggtgacagagcgagactccaactcaaaaaaaaaaaacctgaaaacagcaataatgccagtggtacccaacacggctacaggacttgtgcagtgccaggcattgctcaaagaattcactcattgaattcctggtacccaggaagtctggcctcaagcctgagctctgcccccgctgagcagaacccctctttctaaaccccggacactgggctggacacacagcctctcactcacccccacagctccccgggggcagggcactgttaccattgtacagaccaggaggctgaggctcgagatggagccacctgaagtggcaagttggtagcattgtacctccaatgactcaccaaaacgcctgcataaaaatccaggtgcagtggcactcacctgtagtcccagctacctgggaggctgaggcaggaggagcacttgagcccaggaagtttgaggccagcttgggcaacaccatgagccaaaaataaataaatacaatacaggtaaagtgcttgtgtataggcagtgtggtgcaggtgtgtgtacgcctgacctaggtcccaggagtgactaagggacacgcagagtggggctctccaatcagaagccctcactctggaattggttatgggagggtccctggacctcagcatgtaatgctttgctgtggaggctgtcctgtgtgttcagcagtgtccccacaccaggagcacagcctgtgacagcctggcacatctccagacactgccacacgtccctgtgctaaaggcatctcttcggacctgggctggagggttcattaacccgtatggtggcttaggcataattttccatgggcgaaatgagtagtattgaagacactatggtatttggttggctacagtattgctcgggcaccttcccctcacacgaacaggtgtgggactctggcagaccacacagcctgacacctacggagcggccctgggtctgcggctcccacagggcctctgccactccagccgtgacacacacacatgctgtcaccagcctaggatgtgcacaaagcctgtaggtctgagaccaaggacatgagcttggaggagctggctggattcctcagacctctggggcccgtttgccagagcagagccgagacctgcctgagacctgccttcattgcaaccctggccctgtggcacggctgcaagggaggagagaccgggtgaagggctgcttcccctttccatccaaaaacacacaaacaaaagacgcctgagcttggtgaacacacgcactggtcaggcttagctccatgcggggaggatgtaaattcaaacccaggtgggctgaactccaaagcactcttcggccaaccactggtcactggaatgaactgcccccaaccctctgtcatctcggggacacagaccctgcccccctccgcagggctggacagcagagcagcttccctctacaaaacggtcaaaaaggcaaagaaagacttccacaccctgccgctgcctgggagaaccctgagcttcctttctgcagtgacctctccattagacgcacaggcccacgcatgcgcccacgaacacatgtgaattacttctaggatcagaaggcaaaaaaatgttctttaggtcaaagaaaatgtgttattatataagagtaatgtattcattgttatagcaagttgtaatatgcacttcttttttttttttttttttgagacggagctttgctctttttgcccaggctggagtgcaatggcgcaatctcggctcaccgcaacatctgcctcctgggttcaagcaattctcctgcctcagcctcctgagtagctgggattacaggcatgcaccaccacgcctgggtaattttttgtatttttagtagagacagattttctccatgttggtcaggctggtctcaaactcctgacctcaggtaatccgcctgcctcggcctcccaaagtgctgggattacaggcgtgagccaccacgtccggctcacttctttttttttctgagagagagacagggctcactctatcacccaggctggagtgcagtggtgggatcacagctcactgcagccttgacctcctgggttcaagcgatcctcccatctccgcctcctgagtagctgggactacaggtatgtgccactgcacccggctaatttttttaaaatttctttagagacagggtctctctatgtggcccaggccagggtgcagtggtgtgatcatagctcactgcagcctccaactcctggactgaagcagtcctcccacctcagcctcatgagtagctgggactacaggtgtgagccccacacctggtcctatttcttattggaagggccactgcaggccaagatgctcggtgcccagggaagtcatagcacggccctgcccttgaccccttccagccatcctgggaatctgtccccagccacctccaggccacaggctccttccccatctcttccccacccaggagctgtgttacacagatcactttagcgtttcccacgctaaaccactgaaactgagggttttatctcccactctccttgctcccagttccgcatggccactggcctggctgagacagagccgctggaagtgcccggcaggacctctcacttgaccttcagcctcttacttaaccctcccaatgcagggcggtagcctccactgggtcctgttcagcccctactcctagaaatggtctggggggtaagggtggggccccctgcagagcccttggatgtgtgtttgcgccatggcagtagtacacccacccccttctgcttccgcagaacctggccggctcctccccatcccagggggagaggctcctcctgctcccacttccctcctttacatttggctactactcttaggggtggggctttgtttactttgcattttcctgattcctaatgagattaagcacatttccttaggtttaccggcttcccaatctcctcttctgggaattttcagtgcctattcctttgtccagttatctgccttcttcttcttgattgctgggagcggctgataaatcctagatgaccatcctttctcagttttctcccagcccctcaccttttaatcttaaattgttctctgtgggtgtgtgtgtgtgtgtgtgtgtgtgtgtgtgtgagagagagagaaacagggagagagatacaagcttcaaatacttatgtggccaaatccgtcacaggttttccttctgtgttttacaatttggaaactgctttctggtctctaagattaagttgctaatctgttaaccactggtgtttaattccctgggggagaagcttgtcttcccagccaggctgcaaagtcccccagggtatgtctccatctcccccctccccccatgaggccttagtcaagagattccactgctcctcagaaataccgtgaatttgtcccctccttcctgcctccacccctgctcgccaggaccaatctctgcctccctctcaccctctgccccacatgattaccacagtgatttaaaaaaaaaaaatccatcagaggccaggtgctgtggctcacgcctgtaaccccagcactttgggaggtcaaagcgggcagatcacctgaggtcaggagttcgagaccagcctgaccaacatggagaaaccctgtctctactaaaaatacaaaattagccgggcgtagtggcacatgcctgtaatcccagctactcaggaggctgaggcaggagaattgcttgaacccgggaggcagaggttgcggtgagccgagattgcaccattgcactccagactgggcaacaagaccgaaactccatctcaaaaaaaaaacccaaaaagaatagaaaaatgtccatcagggctggatgcagtggctcaagcctgtaatctcagcacttttttttttttttttgagatggagtctcgctctgtcgcccaggcggaagtgcagtggctggatcttggctcactgcaacctttgcctccaggctccagtgattctcccgcctcagcctcccaagtagctaggactacaagtgtgcaccactaggccaggctaatttttgtgtgtgttttttttttttttttagtagagttggggtttcaccatcttggccaggctggtctcaaactcctgacctcaagtgatcctcccgccttggcctcccaaagtgtggggattacagctgtgagccaccatgtctggccaaatcccaccactttgggaggccgaggtgggaagaccgcttaaagccaggagtttgagaccagcctgggcaacacagagagacccatctctacaagaagtgaaaaaaaaagttgggcacatgttctcaggaccccctgaggctatgtcttgggtcatggtcactcataaataaattgttttaattaaaaataaatgttgaaaaattagctgagcatggtggtatgtacttgtagtcccagctaaggcaggaggatttctttctttctttctttttttttttttttttgagatggagcctcactctgtcgcccaggctggagtgcagtggtgcaatctcggctcactgcaagctccgcctcccgggttcacgccattctgccattctcctgcctcagcctcccaagtagctgggactacaggcgcccgccactgtgcccggctaattttttgtatttttagtagagatggggtttcaccgtgttagccaggatggtctcgatctcctgacctcgtgatccgcccacctcagcctcccaaggtgctgggattacaggcgtgagccaccgcacccagctgggaggctaaggcaggaggatttcttgagcccaggagttcaaggctgcagtgagccaggattgtgccactgcactccagcctgggcaacagaatgagaccacatctctaaaaaaatttaaaaataaataaaaaataaaaatgtcccttagtttgtcactatattgcccaggctggtttggaactcctggcctcatgtaatcctcccagctcagcctcccaaagcgccgggattacaggcataagccactgcacctgaccccaaccgaaaattcttaaggcacatttttgacactaaaaacagtattttataactgctaaaatagatatgttaattctagtcttttcttgtgcacagaaacaaattaccactttagtttctcaaggagcacatgtatacatgttaaatgcattaatttgtttaatataaacatgaaatactttttataacctggattggtacatatttcttttcttttcttttttttctttgaggcaagatctggccctatcaccaggctggagtgcagtggtgcaatcttggctcactgctacctctgcctcccgggctcaagcaatcctcccacctcagtctcctgagtagctgggactacaggcatgtgccaccatgaccggctaatttctgttttgtttttttttgtttgcttttttttttttttttttttttttttgtagagacggagtttcaccatgttgcccagactattctcaaactcctgggctcaagcgatcctcaacctcaacctcccgaagtgttgggattccaggtgtgagccactgcacccagcccttttatttattttttattttttattttttttttttgagacggagtttcgctcttgtcacccagactggagtgcaggggcgcaatcttggctcattgcaacctccacctccgtggttcaagcagttccccggcctcagcctcccgagtagctgagattacaagcacacgccaccaagcccagctaatttttttgtatttttagtagagacagggtttcatcatgttgaccagcctggtctcaaactcctgacctcaggcaatccgcctgcctcagccttccaaagtgctgggattacaggcatgagccactgcgcctggcccccatttcttattatacagtagtttacaaaaaaatcccagcagccagctccagagaggccttgttctgtggtgtctaaggatggagcccaggcagggacggccaaaagctcgctacccctgcccaggaaggcaggagcaccgttgtgtcccgttcctatccctcaaaaataaatcacagccagctcatgtcataggacagagcctgttcgcaatccatcctgtgtctgcggattctcccaggtctgtaaggcagcagggagatgcggcctctcccactccacccaacacgtagccagggcgaggtggggccgggggagaggctgacattcaaaggcatctgagtggtaagaggtgagcgagtgaggtgaatggggactacgttagaaggaccctacgttagaagggtgaggcgctagggccatagcctaagggcactgggaaccctgtgggcatgcgcagttcaagcccatccccgctccctccagctgctgtccatccctgccacacctgaccatttgcctaacctagatccttcctgtcttgcatttcctcaagcatccggagcccaggactgctgagtcaaccctctggaatgcccacaactccccacaggccagccggccttgggactcccgcacagccacgtgagccggtggagccgggtctgtttgctagtggaggctgttaacagcacgggaagtggtcaagggttcaacaagagatgagccatctggtcctccagaggtaaacaatttacaagagacacatcaagccggcctgctgttctggtttttcttttgacagtgaaatatgcagtttctttttcatcctggtgcctattggagagggagactgttccaggcactctgaccccagctaaagcgcctccctggggcaggatctatgcagggaggcagaaaagtcagattttttttcacatcttctttgttccattcccaggactgagcaacttcatgtatttatgtatttatttatttatttatagacaggttctcactatgtcgcccaggctggagtgcagtggtgcggtcacagctcactgcaacctcaatgtcctaggctccagtgatcctcctgcctcagcctcctgagtagccgggaccataggtgtgtaccaccatgccaggggaatttttgtatctttggttagagaaagggttttgctgtgatgttgcccagtctggtctcaaactcctgagctcaagcgattcaccctcctgggcctcccaaagtgctgggattacaggtgggagccactgtgcgtggcccaggactgagcaactttaagtcagatggttaacctacatcatgaggaaagtggatttcctcccaaaggaacagacttattttctagaacccaaagccttgaatttcaagaacctttagccttaaatccatttcctgttggaagcagaccccctcctggtctccccaggtattgcaaccctgctctaccagccactataaatgcccacacaaaaggaacaggggctccattcctgatgctcagagtggagtcactagattctcaagcatatgagatatgtatgtggcctaacagcctgaaataaacagcttgtgctgggattgtaattctagagtttccaaaagtgttgcaaaatattccaggcagacactaaagtttgtgtactacaagctgtttattaattaatttcttatttgccaaacattcttgcttgggtctactgggagatgatttcgttgggaatgcatctccaattttgtaataaagatcaccagggaaagaaggcttgcttcataggggctcatattacaggaaatgtggctagcataggtagttcccataagaaaaaggacagtactaagttttgagctcatgtgaaaaagaaaagggggccgggcgtggtggctcacacctgtaatccgcactttcggaggccgaggcggacggatcacttgaggtcaggagttcaagaccagcttggccaacatggcaaaaccctgtctctattaaaaatacaaaaattagccaggcgtggtggcggacgcctgtaatcccagctacttgggaggctgaggcaggagaatcacttgaacccgggaggcggaggttgtagtgagccaggatcgcatcactgtactccagcctaggcgacaagagcgaaactccatctcaaaagaaaaaaaagaaaagtgacgtctggggaccaggattttgggactctttgcagacatgccaataacctgtgagatacacacccacagactgacacagaggtgagcagaggccttggagtcaacagaagttcaagtctagcctttgcctcattctcttttttttttttttttttttttgagatggagtcttgctctgtcacccaggctggagtgcagtggcgcaatctcggctcactgcaagctccgcctcccgggttcacgccattctcctgcctcagcctcccaagtagctgggactacaggcgcccgctaccatgcccggctaattttttgtatttttagtagagacagggtttcaccgtgttagccaggatggtctcgatctcctgacctcgtgatccacccgcctcggcctcccaaagtgctgggattacaggcatgagccaccgcacccggccacctcattctcactatgtgaccttggacaagtcacttatcctctttgagcctccagttcctcatctatacattggaagccactgaaattatcttacagttactttcagttgcgaggacttgctctttttctcttcattaaaaggaaaacacaaaatataatttatagcttatcctaccactttgtgctgctaaggttaaaatccagggtagtggccaggcgcggtggctcatgcctacaatcctagcattttgggaggccaagacgggtggatcacctgaggtcaggagttttagaccagcctcaccaacatggagaaaccccatctctactaaaaatataaaaattagctgggtgtgttggtgggcacctgtaatcccagctactcgggagactgaggcaggagaattgcctgaacctgggaggcagaggttgcagtgagctgagatcatgccactgcactccagcctgggtgacaatagcaacactccatctctaaaaaaaagaaagaaaaaaatccagggtactctatggtttcctggggctgctgtaaaaaaaaaaaaaaatactacaaactgggtggcttcaaacaagggaaacttattgtcttgcagttctggaggttagaagtccaaatcaaggtgtcggcagggccatgctccctctaaagcagcggtccccaacctttttggcaccagggacaagttttgtggaagacaatttttccactgaccagggtgggggttgggtgggtggttttggggtgattcaagtgcattacattcattgtgcactttatttctactactacattgtaatatataatgaaataattatacaactcacattccataatgtggaatcagtgggagccctgagcttgttttcctgcaactagatggtcccatctgggggtgatggagacagtgacagatcatcaggcattagattctcataaggagcatgcagccgagatccctcgcatgcgtagttcacaatagggttcgtgctcctgtgagaattgaacgcctccactgatcagacaggaggtaacacaagcaatggggagtggttctaaatacagatgaagcttcgcttacctgcctgctgctaacctcctgctatgtggcccagttcctaacagaccatggacaagtacaagtccatggcccaggggttgggaacccttgctctaaaggatctaggaaagaatccttccttgcctcttcctagcttctggtgatggctaccaatccttggcatttctggtcttgtagctgcatgacgccaatctctgcttctgttgtcccatggtgcttcccagtgtctctgtcttcacagctcttcctcttcttataaggatatgacggtattgaattagaggcagggcacaatggctcacacctgtaatcccaacactttgggaggccaagatggacagatcacctgaggttaggagttggagaccagcctggccaacatggcgaaaccccgtctctactaaaaatacaaacattagccaggggtggtggtgggtacctgtaatcccagctactcgggaggctgaggcaggagaatcgctcaaacccaggaggcagagtttgtagtgggctgagatcatgccattgcactccaacctggctacagagcaagccatctcaaaaaaaagaaaagatgtaggcccctgggaaggatgcctggcacactcagaggtgggacaatggtgacagtcctgacactttccctctggagagcatggacccctggtcttggccatgcagccaggcctggcccagcctgcctgtcccccacccccacccacagggactgggcccttcctgcccaggaactattctgattctgcagccctcaggctttattgcttttcctgcttaatgaggtgaggttcgctcagcccagtggcaattcctgtaaaagccatttggatgacccaatggggtgagtttacagggaagcgctccctgagggctaggctggctggaagcagatactttgcccccttccaaggacggtaatgaggtttgaggcttccaatgggggcaggggatgatctgggcgccaaaagccctggcctggggtcaaaagatctgggctccagccccagccgggctaactaggcagtctcctgtctgagctgtactcccctcatgggtgaaatggggatacaggcacatactttatagcctgcagtctgtgtgtaacagagaaccataagctggtgggtcggggagtggggctgggggttatttctcatggttctggaagcgaggagttggagatcagggtgactgcatggtaaggttctggtgagggccctcttccaggttgcagactatggtcctctcatttcatccccacgtggagggaagaggcaagagaacactctggaagttataagagcactaatcccattaatcccattcaccaggcctccaccctcgagatctattcacctcccaaaggccccacctcctaatcacagcacgggggtttgggttcaacataggaatttttttttgagatggcatctcacacagtgttgccaggctgtagtgcagtggcgcaatctctgctcactgcaacctccacctcccgggctcaaacaatcctcccacctcagcctcctgagtagctgggaccacaggtgtgcaccaccacacctggctaactttttgtacttttagtagagacgagatttcaccgtgttgctcagattggtctcaaactcctgagcttaagtgatttgcccacgttggcctcccaaagtgttgggattacagatgtgagacaccacatccaacctcaacatatgaattttagagtgacccaaacattcagtccatcacagtctcctgcaggattacagatgtataatcagtctgtaatccacaaagttctaagcaaaggaaaagaagtaccaatatcactattgctattgttattatcagcacccaagaccttccccagtctcagtgagtggaatattaagatgatcccaaagacgctcgacttctctaacccgtaatactcacaggttccacccctttgattgtgggcagaacctgtgaatattatgatctgactgccatggttaccttatatgacaaaagggagattagcctgggtgggcctgacctaatcagagagccctcaaacaggactggctttttgttttttgttttttttttgagaccgagtctcgctctgtcacctagactggagtgcagtggcatgatctcagctcactgcaacctctgcctcccgggttcaagcagttctcctgcctcagcctcctgttggctcttactggccaaggagattcaaagtatgagagggattcagcgtgagagagattttccattgcaggctttggaggtgaaggtggccaatacaggaggcctctagaagctgaaagcagccccccagtgacagctaggaaggaaatggggacctcagtcctatggccacacggaactgaatgaccttggaagtggatttgtccccagatcctccagacaagaactcagccggaccaacatcttgcatttcagccttgcgatgagcagagaactcagccatgccagactctggaccaacacagctgtgagctcatacatggatattgttttaagctgctgggtctgggatcatttgttacacagcaatagaaaaccaatacatactctgtcaaggaagcctgagaatggaaggcccctactcaatctaccctcccactatagtctggtggttagagacaagggctctggagtcagatggaacggtgttcgaatcttggcaattccatccactggctgtggaacgttgtccacactcccttcctcacctcttatatcctcggtttcctcatctgtgaaatagcagtggaaataaaatgcatggaaatcatcagagcagggtatgcatcgtaaggacacatagtaatagctcaagaaacactgtatatgttaaacattagaaacgagctgagaactaacaccaatgcacctgtgttcttcaatgcactgcctacacaccagagaagagggggaggagcccagatctgctgctctgggagctacaggccaattagggaatcaggaacctgaacagaaaaccacaacttcagggaaagtagatggtacatgtgttatgttattgtggacatggcggggcaaagacaagaccttaggtctttgaactccccctcggagtctggcacaggcctgagtggagctccctcctcaagacttcctttgcactggcttccctgaggaagcatttgcatttagggttctgctgtggaacctctttctcttgatctacatgaagcctgaggccaaggccttacacctgtaagggaggaggtggccctgggcccaggaaaagggtgggtccagtctcccagttctgtccctggcatgtactctccccaggcctatcccacccccaagtcctcccaggctccaaaccctgaggccccaccgactgtcactcaagaaatcaccgaggctgggcatggtggttcatgcctataatcccagcactttgggaggctggggcaggtgaatcacttgaggtcaggaattcaagaccagcctggccaacatggtgaaaccccatctctactgaaaatacacaaattagccaggcgtggtggcgggcgcctgtaatcccagctacttgggaggctgagacaatagaatcgcttgagcctgggaggtggaggttgcagtgagccgagattgcaacacggcactccagcctgggcgacagagagagattctgtctcaaaaaaaaaaaaaaaaaaaaaaagaaaagaaaagaaaagaaagaaagaaaagaaaagaaaaaagaaatcaccaagccctctctatacccataagcacagccttgaccgaagtcctgacggctgagcatgcagctcaaatccctggggagataccactgcacatacacgagggcggtcgtcatccaaaagacagaccacagcaagcgctggagaggatgtggggcaactgaaaccctggtacgctactggtgacatgtaagagggcgcagctgctttggaaaacagcttggcagttcctcaaatggttaagtatgaaattaagcaaatggttaaatgtaaatacgacccagcagttccactcctaagtatacatccaagaggaatgttaacatatgtccacgcaaaacccatacacagacattcagagcagcattactcatagtagccaagaagtaaaaacagctcaaatatttatcagctgatgagtgggtaaacaaaatgtgggacagccatacaaagggacactatagggccatataaaagggaccaagccctgatgcatgctgtgagacagatgaaccttgaaaacggtatgctaagtgaaagaagccagaaccagcaggccacagaaggtatggctccacggacaagcaagtccagagcaggcaaatccagagagacagaaagtggatcagtcattgccagaagttgagggaggggagaatgggagtcattactaataggtatggggtttctttctggggtaaaactgctctggatttagatagtggtgatggttgcacagctttgtgaatatgccaaaaaaaagaaaaaaacactaaattgtatacttttttttttttttgagacagcctccctctattacccaggctggagtgcagtggcacaatcttggctcactgcaacctctgcctcctgggttcaagcgattttcctgcctcagcctcctgagattacaggcgtatgccaccacacttggctaatttttttttttttcgagacagggtctccctctgttgtccatgctagagtgcagtggtgccatcttggctcactgaaacctctgcctcccgggtttgagcaattctcccacctcagcctcccaagtaggtgggactacaggcatgcaccacccacttggctactttttgaatttttttgtagagacagggttttgccatgttgcccaggctggtctcaaactcctggagtcaaacaatccatccgcctcggatatttctcactggcataatcagtgctgaaagatcattgaaaaggggcttgcatgatccagaggtcactgttatttaatgcgctctcctcatctcctgcaggttgtgacttcaatataccctctcatgagacctttcctggccccttatctgtaagtgtgaccaccgggaccccgtctcccaattccctcttcctgctttatttttctctttagcatttaataccatctgacattccaaacattaccttgtccttgtctggtgtttgtcaccccaactagaagtgctagggggcaagtactaggaagcagggttttttctttttctttcctttttttttgagatgaaatttctctcttgtctcccaggctggagtacagtggcgcaatatcggttcactgcaacctccacctcccgggttcaagtgattctcctgcctcagcctcccaagtagttggcactacaggtgcctgccatcatgcccaactaatttttgtatttttagtagagatggggtttcactccgttggccaggctggtctcgaactcctgacctcatgactctcccaggaggcagagttttttttttttttttttttttttttgagatggaggcttgctctgtcacccaggctggagtgcagtggcgcaatctcggctcactgcaagctcccaggaggcagagtttttgtctgcgtggttcactgctaagtccccagcactaagaggacaggacctaacacataggaggcactcagcaaacatccatgaacgaatgaatgaatctgtatctccagtggctttgtcctctcttatatcagctttgttccacatcttacacttaggaggtgattcaattaaacattgctttttgtgtgtgtttggtggggtttttttgtttttttgtctttttgttttttgagacagcatctcaatcttttgcctaggctggtgtacagtggtgccatcaccactcactgcagcctcaacttcccaaactcaggtgattctcccacctcaactccccgagtagctgggactacaggcacgcaccaccacaccagctactttttgtatttttagtagagatggggtttcaccatgttgccatggctggtctcaaactcctggcctcaagccatccatttgcccaactaggccccccagagtgctgggattatgggcgtgagccactgcacccggccaaccattgttgagtgagcaagtaaatgaactcatcaacgaatttctccctgggtagcgaagctcccgctttttgaggtaacccagacttttcatttgtatgtttcctgagtccctgactgtacattcttcctgcatattgtctccaggactaagagaatggagccttttgccaagaagaggttgcgttctcaggcctccagtttagattaaatagtggttttacaaggggaaacaaagtgacaaacccccagaagttgtggggagctgagacggggtgggaatagggttccccagggacaaactccttcttgtccccctgcccagcgccccagggcacactgcccagtgggtgaaagcagccagacacacgggctcactgcagttaccaagcaatcctaagtgtatcaagatgggcgcgctgacgacagctgcaccgagtgaatctggaatgaattggggggttgttaagatcgccgacttaagcctcttctcacaggaaaaatatttatttcactgagctctgctttttggaaagctgcgcctgtaacagtctgcatcgatctagcagagttttggctactgctgggttttgtctccctcctgtctcggttagcgtgggctgtgtgtgtgtgtgtgtgtgtgtgtgtgtgtgtgtccacagcacaccctcccattattaagcaatcagccaaaagactcagccaggacactctgctcttctttaaccagaaaaaagatgaacacgaactgagttcgtggcatgaggcacgagaccttcatgttttatcttcaaagatgcctgcttgaaactagcaattgtttctttccctttttatctagtaaattgctccctctacctcctcccagtttgggaaaaaaatacaagtatgaagaagaaagtaaaaatcactcctatggttaggttaggcttgactgcagaattgtttcctttttttttctttttttctttttttttgagacggagtctcactgttgcccaggctggagtgcagtagcatgcgatcttggctcactgcaacctccacctcctgggttcaagcgattctcctgcctcagcctcctgagcagctgggactacaggcccgcatcaccatgcccggctaatttttgtatttttagtagagacggggtttcaccatgttggccaggctgtcctttccttttctactctttggagtcgaggggcctgggtttgaatcctagctctgccacttgctggctgtgtaaccctgagaatcatgtcaccacttggaacctctgtttcctcatctgtcaaatggtgtaataatagtgcctgcctctttgattgttgggaggagtaaacaagagaaagtatatatagagcttagtgaaggttcagcaacaataaatgcaaatggtacctattttataggagaaatatatacaattttttatcttctttttcataaaacagtatagcgtatacagtttcctgtttcactgcctcattttagaggcagagtcttgctgtgttgcccaggctggcctcaaactcctgtctgtgctcaaatgatcctcctgcctcagcctcctgagtagctgggattacaggcacccaccaccatgcccggctaatttttgtacttttagtagagacggggtttcatcgtgttggtcaggctggtctcgaactcctgacctcatgatccgcccacctcggcctcccaaagtgctgggattacaggcgtgagctaccgtgcccggccaactcacaagcatttctaatgactgcaaaatagtccattgggggcccatccctacattagtttttaaaccgtttcctatggatggaaatagaagttgcttccgaaatattataaagattgctgtgataaacacctccagactcaaatcttggtctatgtttgaggctctgtctttaggatgaattctcagaagttaaattgttggtcaaatagtatgatcacttccaagagccttgatataccatacttagcactgcaagttgctttcgagaaagattacctacagatgtgtatgagagaaccctgtggccaagcgaggtggctcatgcctatagtcccaacactttgggaggccaaggtgggaggatcacttgagcccaggagttcaagaccagccttggcaacatagtgagaccccatctctccacacacacaaagaaagagagaggctgggcatggtggttcacacctataatcctagcactttaggagacctaggcaggtggatcacttgaggtcaggagttcgagaccagcctggccaacatggcaaaacctcatctctactacagatacaaaaattagccaggcctggtggcatgtgcctgtaatcccagctacttgggaggctgaggcaggagaattgcttgaacctgggaggtggaggttgcagtgagctgagatcacaccactgcactttagtctgggcaacagagtgagactcttctcagaaaaaaaaagagagaaagagagagagaacccatcttaccacatcccagctgcattgaggattattaccttttagttgttgttaatttgacaggcaaaatgacatctcattcttaaatctgcattaaaaaaatttcacccagtatttttctaatactagttttattggctacaatgtgttgagtgtttactacatgccaagcatagggtaaatgtcttttacttttttttttttttttttttttgagagacagggtcttgcctgttgcccaggctggagtgcagtgatgcgatcatacctcactacagccttgaactcctgggctcaagggatctttctgcatcagcctctctcttaagtagctaggactccaggtgcaccaccatgcctggctaatttttttttatttttatttttttgtagtaacagggcctcggtatattgcccaggctggtctcaaactcctgggctcaagtgctcctcctacctcggcctcccaaagtactgggattacaggtgtgagacaccatacccagcctccataaaatgttttaatcaaacttctgggtatgtacccaaaagaagcgaaagcagggactctaacaaatatttgtacatctatattcatagccacattattcatcatagcaaaaaggtgcaagagacccaaatgtccattgacagatgaatggataaacaaaatgtggtgtgtatatatgcaatgagatattattcagccttaaaaaggaagaaaatgttgacccatacgacaacatggatgaaccatgaagacattatgataagaaaatatgcccatcacacaaggacaagtgatgtatgatccttttatatgaggttcctagaatactcaaattcagagacagaaatcagaatggttggactgagcgaggtggctcacacctgtaatcccagcactttgggagaccacggtgggaggatcgctcgagcccaggagtttgagaccagcctggacaacagagtgagatcctatctctacaaaataaaactttttaaaaattagccaggtgtggtggtatatgcctactactcaggaggctgaggtgggaggattgattagactcaagagatcaaggttacagtgagctgtaattgccccactgcactgcagcctgggaaacagagcgagattctgtctcaaaaaaaaaaaattataatcaatctttacatgttattttataagatgttattattaccctccagccttctttaaaagatgatgaaactaaggctcagagagatgaaacacgttcctagagtcacatagcttataaatggtgaagacaggtttagatgccaggtcttactctccaaggctacgttatcctgcaaattctggtggacctgggaggtaaaggggaaatacaatcaagctctaggtggcagatggagttagcaagtacccagtgccaaacggaactgttggccctgagagctcagagttcagttctaaatttattctctctgaccttattgtggattctaaatttggccaaacaagttcttccagaccgattagtgacgtggatacattgttttgaagataaaacccttttcctggtatgaaagaaaaaaaataataatgcagcatttgcttgcagaagccaccctgccgctggttaacagccatctgaaaatgattctgggttttccacctgatggtggacacatgtgcttgttggccgatttcttggggacagtgattaaaaccatttcctgaaccgaagtctgaatttctcctcctgaatgaaccagaaacaaaacatcaggaaatatccaggcatgaaaattctaaccagggccgggtgcggtggctcacaactgtaatcccagcactttgggaggctgaagggggtggatcacctgaggtcaggagtttgagaccagactggttaacatgacaaaaccccatctctactaaaaatacaaaaattagccaggcgtggtggcaggcacctgtaatcccagctactcgggaggctgaggcggaagaatcacttgaaccctggaagcagaggttgcagtgagccgagatcacaccattgcactccagcctaggtgacaagagcgaaactccgtctcaaaaaaaaaaaaaaaaaaaaattctaaccagaaccaaacttaaaattctcccaaaattacaaattaagaccaaaataggcctctttgggtggtttccaggccagggaggagttatggggtcctcggataatcaccagctgagtcctgacttctctgggaaggtattggggtgactgacctgtttgtgaccccttctcagacaccctatctccaatcaggtggaggaggcacgtgacccacatggtctggccactgatgactgaacaagctatggacaccggaccccggagagaccattcactcactggccacgaacatgagttcagatacatgccccaaaaggatgagcctgggtactggattccctccctcagaaacgtgaatcaagagacacaggatgttcctgttggtccagatacttgagctaaaaggtgatggatacctggatgtggggtggtcattctggggagtacgtccatatagaaagaggagcaggtgctgtgggattctggatcccagtgatagagctaagtggctggatcaagcttcacctgaaacccactctacttgtcttagtccattttgtgttgctataaaagaatacctgcaactgggtaatgtataaagaaaagagacttatttcattttatagctctgcagtctgagacatttaaagggatggccttgacttctggcaagggcttgcacgttgcatcaccacacgcaggaaaagggaaaacagaagggagactgcaaaaaaggggaaaacctgaaggtcatcatagctttataataacccactctcacagcaatgagttagatggagaaccaattcagtctcacgagagtgacagcaagaactcactcactggtgagagggtagcacttccaagccattcatgagggattcacctccatagcccaacacctcccactaggccccgcctcccaacactgccacagtggagatcaaattgcaacatgagttttggtggagacaaacaccccctatccaaatcacagcactacccccgaactttccattacacgaaccaaagaatcttcctttaaattagtgtcattgggttttctgggatttacctttttttttttttttttttttttgagacagggtcttgctctgtcacccaggctagagtgtagtggcacaaacacagctcactgtaggctcgacctcctgggctcaagggatcctcccacctcagcaccccccacctatgccctcaaagtagctggaactacaggaaccaccacacctggctaattaaaaaaaaaaaattttgtagaggccgggtgcggtgtctcatgcctgtaatcccagcactttgggaggccgaggtgagtggatcacctgaggtcaggagtacaagaccaacctgaccaacatggtgaaaacctgtctctattaaaaatacaaaaattagctgggcgtggtggcacatgcctgtaatcccagctactcgggaggctgaggcaggagaatcgcttgaacgcgggaggcggaggttgcagtgagccaaaatcacgccactgcactccagcctgggcaacagaacgagactgtcttaaaaaataaaaaaaaaaattgtagggacacagtttcactatgttgcccaggccagtcttcaactcctgggcttaagcaatcctcctgtctttacctcccaaagtgctgggattacaggcatgagccaccacacccagcctaacatgtttttaataaccaaaagaaaataaacatctccatagccttgtgacacatccttttttaacctgaaattggtagagtaggtttctgattcatagaacccaaacaaacattcctccctaaagcaggcagaggctctttgggagagtttactttcaaaacagtgtccctgcaagtcccaagtgacaagttcccctttcctggtctgaagcattctgaggagaggcaaagaggttaaggcttagctgcaggaacacgctgtccccacgacaaccccttctcagcctcggaactgctgttatcagagttgtgttgtctcttgaaggtccggacaaagggtgaagccaggactcctgagtctaaagggcaggtcggggcctgggagagaaggggaagctggcctggggcagagatatgttttccatttcccctggggtcccgcgcaggacagctgctgtccatagccagttcagccaaccgtgggaggaatcacattcactcgacaggcaggcagtggcggcactgggatttgaacatggggctgatgggctccaggcgtggcacctgtgccactacagtgcggggaagctctgactgctgcagcctccgttgtcgccacatctgccctcgaatttcccttccagctggttctgcaatcagcagcccctccagacatccctgggaggctccaaggagctgactcctgatgaggaaaaggatcagccgcagactcactcctcctccagccacttccagacccacgggaggcgtgggtgtgacccagactacctgggagcatctgcttttgtctttatccagggcaggaccctctgaaggaggagccctcagagaagaagggaaaagccaaaaggaattaaaagccaatttccaaatggaaataaataagcagtcataattggccacattggtgaaattgggcactaagggccaggcaatgggctgtgggataatgtcacttgaggcttacggccacgctcagaggaaggtgctgaggtccagggaggttcaggcaggtgacatgactcacccagagccactggctggagagtggcagggctagcttggagcccaggtggtggacttcataggtgcagccgtgactgctgtcatccctcccatggggagttgttgcagagagtgagacacagcgccctaagctatttctccatctggtgtgcctggatgcctctgcccacccaggaccctcctctcgggtggcccaccactgcccttccatcacagttcataccttctctcgtggacccacaggggtgtccactggaccaggaccccagggaggatcccagtcctggccccaccactctctggctggtgacacgggggaagtcaattctttccaagcctcagctttctcacctgtacaatgggagtttgtgctagacaagaagttttcaggacggacacagtggctcacgcctgtaatcccaacacttggggaggccgaggcgggtgggtcacttgaggtcaggagttcgagaccagcctggccaacatggtgaaacctcatctctactaaaaatataaaaattagccagattgtcatagcgcatgcctgtagtcccagttactcgggagactgaagccaggagaatcacttgaaccggggaggtggaggttgcagtgggccaagatctcaccactgtactccagcccgggtgacagagagagactgtctcaaaaaaaaaaaaaaaaaaaaaagttttcaaactgctgactgcacctgtttgtaggccctgagctcaactgagtgagtcacacaggtattcactgacgtgattctgcctccaaggccacattttctccagtgcacctctgtccttcagcaagtgacctgaggctgggactgccacatgctgcctcccatcagcaccttacccagacctactgctggctacaacgtgcttaatgattgtcaggtggctcacataccctgttctgttcggcttcacagtgtctgccagcccgtggagtatggcacagtggctactagccagggtcaggcagtgcgactccacctctccaagcgccccagtgcagcgtctgatcatagggaataactctacctgcttcacaggactattctgtgaatactaattaggataacatatgtgaaggtcttggcgttgtgagcacatgagcccaaggtcagctccctaaaatgatgaagttcatatcacaagaggcccctagaggtcaggacagcctttcggtacctttctatggcaaacaagcggctggttctctgccacctattttctccccttcattgggcaagactgagctggcagaataatggccacatcagtatttactctctactttctggcttccctagattggtgccagccatttgtccccccatccaagacaaccctgatccccatccccagaaggaaaacacctcacctctctcacaatttgagaatggctgtcaactcgagcacattattagatttaattgtatctaatacttgaatacctaatatattactttctctctctctctcttttttttttttttttttgagatggagtttcattcttattccccaggctggagtgcaatggcgtggtctcggctcactgcaaactccgcctcccggcttcaagcgattctcctgcctcagcctcccgacttgctgggattacaggctctcgccactacacctggctaatttctgtatttttagtagagacggggtttcaccatgttggtcaggctggtctcgaactcctggcttcaggtgatccacctgcctcgacctcccaaagtgctggcactataggcgtgagccaccgcacctggccccaatatattactttcaaggacaaaaactgcaattacttttgcaccaacctaatatttaaggtaggacaccgtgaagcccagtgagatctctgtggtggacaaacagcgtggctgctaggctgtgagccctcccgcctgtctgctctccatgctgtgcgccactcctgagagctgggtcagcagtcgcactgttggctttgctctgacctcgagtctatttcttttccatgtgtgtgtgcagccgctgcctggagtggaaatctccactgagggacagaccttctttcaaggctcacatcaggcaggatcccacgggaaagggggctggctgagtcaggagggttctctgcctgagttcccgtgtgacattgggcaaatcactcaacgctcagagctgcgcatttttatctccatctgcttggagcaggaattgcaaagagtttcagctcaggttccaacgccaaggtgggagatattggttgctttgggtatagtgttgagatagattctgaggctgtgtatgggctcactaggaaagggtgctgtgtctgccatgaagtgggaaatcggtgggggaagaaaaaagaaacccggctgggcacggtggctcacacctgtaatcccaacactttgggaggccggggcaggaggatcacctgaggttaggagtttgagaccagcctggccaacatggcaaaaacttgtctctactaaaaatacaaaaattagccaggcatggtggcgcatgcctgtaatcccagctacctgggaggctgaaacaggagaatcacttgaacccaggaggcagagattgcagtgagccaagatcatgccactgcattccagcctgggtgacagagcgagaccctgtctcaaaaataaaacccaaaaaacaaaacaaaacaaacaaaaaaaccccatggtgctggccgggtgcggtggctcacgcctgtaatcccagccttttgggaggctgaggcaggaggatcacttgagccctagagttcaagaccagcttgagcaacatggcaaaaccctgactctactaaaaataccaaaaaaaaaaaaaaaatgctggacgtggtgatgtgtgactgtggtcccagctactcaggaggctgaggcaagaagattgctggagcctaggcctgtctggctaacttggctctaccttggctcagagccccctcttcctttttttttttttttttgagatggagtctcgccctgtcgcccaggctggagggcagtggtgtgatctcggctctccgcaacctccgcctcccgggttcaagcaattctcctgcctcagcctcctgagtagctgggattacaggcacgcaccacgacactgggctaattttttgtatctttagtagagatggggtttcctcatgttggccaggctggtctcgaactcctgaccttgtgatccacccgccttggcctcccaaagtgctgggactacaggcatgagccactgtgcctgccgggtgggtttcttatggcgaatgatcccacaccacttttcagtgcacgtagttacatggagtagaacacagacagtcacacctccacgttcttttggccaccatgactggttcaaccaaggaatctgctccaagctaggtgaaggaaaatcagccctaaggccccccgtcgccacgcacctcactgtatccagctatacctaaagccaaaccgaatcccagacatctaaattttatgagccagtaaattcccttctttgcttaagccagtataaatcagggtcccatcccttgtaatgctgagtcccaaggcccagactctgggcctttcgtttttccattcaggccccagaatgaagaccaaggaagggtttattaacatgacagtgaacatctagggccttatatacatttttcttcaattcagccaagacaagaggcctagaatacagagaaaggacacccatttcttttcttttcttttcttttcttttcttttcttttcttttttgagacggagtcacgctctgttgcccagagtcacgctctgttgctggagtgcagtggcgcaatctcggctcaccgcaatctccgtctcccgggttcaagcaattctcctgcttcagcctcccaagtagctgggactacaggtgcctgccactacacccagctaaattttgtatttttagtagagatggggtttcgcctgttgctcaggctggtctcgaattcctgacctcaggtgatccacctgccccgacctctgaaagtgctgggattacaggcgtgagtcaccacgcccagcctaggacacccatttctttgtttgttttgtttgttttttgttgttgtttgttgtttttttgagacggcgtctcactctgttgcctaggctggagtgcggtggtgccatctcagctcactgcaacctctgctgggttcaagcgattctccctcctcagcctcccaagtagctgggactacaggcgtgtgccaccatgcccagctaatttttgtattttttgtagcaatggggtttcaccatgttggccaggctggtctctaactcctggcctcaagtgatccactgccttagtctcccaaagtgctgggattacaggcgtgagtcaccgcgaccagcctaggacacctatttcttcaaacataggaagaaacatcttatctgcatgatccctcctggggagctatcttacggtcttatgtgataaggtgacctctcctttgggtgagtggagtaaaaaagcgggcgaggtatctggaatatgcttctatccctcctaacctcccctacaaacaaagctttcctgaatgccttgtccttagcttcctggactctgaacctagcttggctaaattttctttttaaagcatcagcataaatcatgaataccttgggaagggaacattaaccatcagccggcaaagttaaaattcccctccagcccacttaaatggactgaaacctccaccccatccccaaacgagcctccctggccttgtccttgaacatttcaaaatcgggtttctgctttaagttctttaaactactttttttttttttttttttttttttgagagggagtctcgctctgttacccaggctggagtgcaatggcacgatcttggctcactgcaacctccacctcctgggttcaagtgattctcctgcctcaacctcccaagtagctgtgattacaggcacccgccacaacgcccagctaatttttgtattttcagtagagacggggtttcaccatgttggtcaggctggtctcaaattcctgacctcgtgatccgcctgcctcggcctcccaaagtgctgggattacaggcgtgagccaccgcgcccggccgctgctttaagttcttaacacgtcctcaccgcggctcagctcactgtacggcccctgcatagagaggggagggcaggggccatgatactgaactcacagctctgggcatttctgaagtctggcccttgaagcttttcctagagcaaattgttttcttctccccttcaggaaactgaaaattcacacagcagccgtgggagtcagagtagcaaaggctttgagatcacatagacctgggacacgtgcttgctttgtgattacgggtaagttccgtagcctctctgagcttccatttctctttctgtggaaaggggatactaatactgcccactgtgagggctgtttctgagattccatgctgctgtgactagcatctgcctgactagcagaggatagttacagtgtcagcgtccatggccctctcatgagactggggcagggggtgggaagggtgtttgggacaccctgggaaccttagcatcattctgccatgggagtatgacctgctgttccctggctgccctcagtctgaggcttgctctgccagtcccgggagaactgtccactcatcatcccggcagagacagatctctttttcgctgtgcacaggtggggaaactgactctgcccagtcacctgagtctgttgacagaggcacctggccatctgtatcctggtcctcagctctgagaccagcaggaaagagaggaggacattcctaatgggggacacagtgaccttcctcctcctgcccctgatgctcccaccactgtggtcccctggtggtgccaaccactcagactccagaagctgagtcccctctcagtcccatgaacaggcaaagctgcttcctgcagaggccccaacctttgcgcctcctcctcagagaatctgattctccctcctcagtgcggttcctttcccacacacacccacacaacaatccagactcagagaatggagtgcctcaaattaggggaaatggccgggcacagtggctcacacctgtaatcccagcactttgggaggtcaaggcgggcggatcacttgaggtcaggagttcaaggccagactggccaacatggcaaaactccatctcccctaaaaatacaaaaattagctgggcgtggtggcgggtgcctgtaatcccagctacttgggaggctgaggcgcgagaatcacttgaacctggatggcagaggttgcagtgagccaagatcaagccactgccctccagcctgggcaacagagcgagactccatctcaaaaaaaaaaaaaaattcaggaaatgatgaggctgcacacacacatgcacacaccacacatggctcatgcatgcacatgacatgcattcacatgcacacatgcccatgcatgtatgtgttcacatatgcacacacagcacctgctcacatgcacacacaggacagtcacacacatgcacacacacgcatgcacatgcacactcacatatacattatacacatatgtacacatggcgcgcacacacccatacatgcatgctcacacatgtgcacacatggtgcacactcacacacccacacatgcatgctcacacatgcacatacacactcccctcttcacccagccaccccgctattcattctggatccccttacccaaccctggttcaggaccacctctcctgacccctaggctaggtcaggccactctcctgacaccctcattactcataggctttctcttcagcacttttaccacgattgtgactaattacatgtgtgatcattttggtaccaggtaatattaatagctcgaaaaatattactgggctttcctctttggcctttctgggtaagtagcccttcccctctcaggcctgaggcacctggctacctggaaaatatttgaatttgtacagaaggaataaagaggaccatggcagatctagttcctgatcatcaacacagactttgctatgagacagtaggtttagaagtcaccgctgcgcactgaccctctgggggcttgggaggaaagtgctctgagaccaccctccagcagcttaggggtggggcccctggaggtgcagcaagttgagaggaaggaagccctggtgtttcgctttccttggccacactggtcccctccgggccaggatgggctcaatgtgttcttgctcaggtaggtgacacctcattaagacaaggggcagagggacctgcagaagggtctgggagtagatggctcaggtaggggtcagatgcagtagagaagagggggctctgaaaaaaaaaaaaaggctgggcgcagtggctcatgcctgtaatcccagtactttgggaggccaaggcgggtggatcacctgaggtcaggagttcaagaccagcctggccaacctggcgaaaccccatctctactaaaaatacaaaaattagccgggcgtggtggcaggcgcctgtaatcccagctactcaggaggccgaagcaagagaatcacttgaacccgggaggcggaggttgcagtgagctgagatcgcaccattgcactccagcctgggcaacaagagcagaaactccatctcaaaaaaaaaaaaaaaaaaaaaagaagagggcgctctgagccaaggtagagccaagtcaaccaggcaggcggaggcccagagcatgagttttacctactgccggtttcggccaaaatgccagaaagccaagcagcaatcttgggcatcggacttggctagaaatccctctcctcctgggaagtctcgtcatcaacacccagacacccccacccccacccacccacccagtgccagcttagagaaaagctgggaggagcagaaggaaatttgagaccaagcattacctaaaggcctaaagtactggatcagattaaattaaatctagttctttttccttgttgccctatgagtaggctttgtgagaaatatcagatccattgcaggaaataaagaaaagacatgttctctgcagacccacatggcaggtgagtaaatgtacagcatggatatccgtcaccagcggtgcattcccctaggcaggcaccacaccgtcctgtggagcattgtgttagtaggcgctcagtaaacacccatgaagtgagtcaatgtatgattaaattccaaccctgcgtggcagcagacaggtggctggtctctgggactggggaagaacaaggctctgtatgtagttggcttcctctggaaggacaggttttaagtcagatccgactgggttcaaaccttggcttggccaaggcagcttctagcatggcctccagtgatcccacctcctggcctgagtgtgggtggacacttctgctatttatttatttatttgatttattttgagacagagtcttgccctgacacccaggctggagtgcagtggtgtgatctccgctcactgcaacctccacctcccggcttcaagtgattctcctgcctcagcctcccaagtagctggaaccaaaggcatgcaccaccatgcctggctaatttttgtatttttagttgtttaggatttgttttagttgtattttagttgtttagggttatttttagttgtattttagttgtttagggtttcaccatgttggccaggctgatctcaaactcctgacctcaagtgatccacccacctcagcctcccacagttctgggattacaggcatgagccaccatgcccagccatgggtaggcacttctaatgagcagaatatggcaaaagggacaggatgtcacctccaagattacgttataaaagacagtgacttccacctttctctctccctctctctcacatgagcacgcgcgcgtgcacgcgcgcgcgcacacacacacacacacacacacacacacacataacttcttggctttcttgctttgacacagcaagctgccatgctggagatacccacatagaaaagaattgaaatcagcctccagccactaatagatagataactaatagcaatagataactaatacagccactcattagctctgccctcagaccagttcttaacctgtatgtgtgtaccctcatctgaaaatgggcataatagcacatccccaccatacaggctaattgtgaggaccacgaaaatgaatggatgggtggatgggtagatgggtagatggatggaaggatggttgggtgggtgaatagatgaatgggtgggcgaagggatggatggatggatggatggatagatggatggatggatggatgagtgggtagatgggtggatgagtgagtgggtggggatgggtaaattggtggatggatagatggatgggtggaaggaagaaaagatggatggatggatggatggatggataggtggatgagtagatggttaggtggataggtggatgggtgcgtggatggatggatggatggatggatggatggatggatgggtaggtgggtgggtgggtgattggatggatggaaggatggatgggtggatagatggaaccactggctggagccgtgtgaatatcacagaatcaggaagtgaagcccaatcagtaagtcccgatggggctgtgaataaccctcactgagcagctgtcacaaggctaagcacctggctgtccccctaggaaagcccctcaccaaggtgaagctctacctccgtcctcacttcacccgcagcccgttcctcctggggctgcaaaggaccagtgcttagagctacctctggtcagaagccagcagagtcctacagtaaaaggggttggggccccctgctgagctcagtactgaagaggaggcatggccaggcagcccagcaccctctgccctccacccagcaacccccaggctagattctgccatccttttctcattgattatgttccccatgaggctgctcttgcccaaaagctggcccagcttgacaccacagagacaaaccaaccaacagccacagcatctgatagccccagtaactgactcttgtgggaaggccgcggccagctggcctgagtcccacagcctgaccatggctccgtcagtggccagtcctgggggcaacagggacacaggggaagggtcaggccccagctctcatggtgtaacagataccagctccaagtcaggagaatggactttccacctgcatgcacgtcacagtgcccagaaccctaacagacatgcatcagacttgacaccttccccacccaccaccccaggtttggctgcccatagaggcgcacacctgtcctcccatctcctcctgggctggagccatgtgagcagaaggggatgtgaagacagatccttgatgtccacaggtgcggggactgcttgccaacccatggcaactcacctgtagcgcatggagatttgggggtaaacccagtgatgctgagtatgtgggctgcccaagctgggtggcaaccaaccccagcattgaatgtgctgagagctggaccggtggatgtccccactgccctgaggcaggtccaggagaaggctcctacctgctgtgcagagggcaaggtaagtcttgtccttgatctacagccagaagacagcagggctgcttctgtctgcgtcccagcctccactcttctctagataccatcaccaccatgacaactgcagttaacacttagtgaagacccctaggtgccacgcgcccatgcaatacccacagacccctctgaggtaggccctgtaatggtccctacgttagggaggggcggtcccaggcccagctggtcagtgagggaggtaggatttgaacccaggcagcctggctttggggcattgctctctgccacgtggccggttcctacacccttgccagctaccccctgcaaaggtggccagcctggctttgtccttcaggatcctctgatctctctcaggggcctccaacccacccactggctctccctgctgacaaagcaactatttcctggccccaaagccccagtctctggaaatgaccctccttccttctccagctcatggctgtcagaggctcctaactgcacccacccccgatcagccaaagccaattactccacgtccaagacacaggcgtgttaaaatgtaaacggccattcatcatctggcagcgtgaccgtttgcccctatcaggccccagtccggcctcaccacgcctccatgctctcctcagcgtcaaagaaacagccttgtcctgccagggccttcgccaggcccggcctgggaagtcagggctctctgacccaatggagcgaatcgttgcgagcatttatttaatagcattatcttgatgatgaataaatcacaccttcatgaaccatttttccatttgtagccccaagtcaagactcccaaaatgttaccagatgtcaggcatgaaatatacacccctggcaagctctgccatgcacaggagtcatgctgctttcaatccacgggagagccggacacgagcgttccaaggcaggagcagaactccatgttggccattataaagacaagattccttttcccccgctttttatagcctctctgggtaagatgtgtctggaaggaggtgtgggccaggaaagagcatatgtctgatgcctgggattccaggacagaaagtacagccgactccaagctcttgggatgggattggagggtctcaaaaccttgccagctttggagtcagagagaaaagagtcccaaccccagatttatcatttgctaacaaatgtgaccttgggcaaatcagctcacctctctggccctcaacagagataatcctgggacctatttcacagtcatggagaggattaaatgggaagaggaataaaaggagtttggagaagtgcccaggacatagtatgcactgagcaaattccgtagtaagaggagtattagtaatagctactattgattaggtggtgttgtgagttgaacagtgttcccccaaaattcatgtccacccagagacacagaatgtgaccatttgtggaaatagggtctttgcaaatgtaattagttaagatgaggtcatactagattagggtaggccctaagtctaatgactggtgtccttattagaagaggataggggctgggcacagtggttcacacttgtaatcccagggctttaggaggctgagacaggaggatggcttgagcccagaagttcaagaccagcctggacaacatactgaaacccatccagtctctaaaaaagaaactaaaagccaggtgcagtggcttacatctgtaatcctagaactttgggaggctgagacaggaggatcacttgaggccaggagttcaagaccggcctgggcaacatagcaagaccccatctctattaaaaaataaataaataataaataaaattaaacttaaaaaatttaaaaattagccagccatggtgggaggattgcttgagcccaggagtttgaggctgcagtgagctatgatcaggccactgcactccagcttgagcaacagagtgagatcctgtctaaaacaagatgggacacacaggaagtggtggtgcaaagatggtgcagccgcaagctgaggaacaacaaggatccctgaccaccagcagaagctaagaggcaagaaaggattcttccttagagtcttcagagggaaagtggccctgctgacaccctgatttcaaacttctagcatccagaactgtgaaagaacgagtttctgttgtttgaagccacctagttggaggtgcttcattacagcagtcctaggaagctaatacaggtggttaccatgcactaggttctctgcattataaatgcatcatatgtgtgaattcacctaaatcctcacaacaactgtaagaggttactataccatgttacagagagagtgatcaagactcagagaagttaagggactcatagctggatctagatttgaatttggtctatctggtctaaagcccacttttaaggaccaactgtgtatgccaagtgctagagccacttccttgctcagtcctcaccgaccacactgtgctatctttattcacattttgcagttgaggaaacaggttcaggcaggtctgtccaaggccaccctatttagggtctgacaaagccaggttcatctgactccaatgccaacgcccatgctgttgaccagaccatccctgccaacttcccaatatgaatgctttgagtggctctcggcccccgggctgtggaacaccagcacaccagtgcctggagggcagcagctgtccagcaaatgtctgctcattcatttgttcacgcattcagggcaagtcgaacggcagacggggcaggagatccagggccagcatcgatggtgcagggagccctctggccccttaaatatcctcagacaatcccagaaatcattcctgggtctaccttatgtgggttttctagaatagctactgctgaactgtagggtagtgagggagagacacaaatacaggcaaaaccacacaacagcgaagattccataagggcaggagtgtttttccaccaggaaacaagaaccagttcatctgagttccttcgccttttgtcccaagacacaaaaatgtcaaaaatgtgcaagggctctggccacagatggatactgtgtctcaccccgacgggctgcttcctgcatggggctgaaggtcagggtgaaggttgctgccctgagagtcaggggaagttggtctgcctcctgctgtgtcacgtacttgccatggtgtgtgggatgaggcccatcatctcccagaattaagctgtagctgactataaaaccacaggtgagggctgggtgtgggggctcatgcctgtaatcccagaattttgggatgctaaggcaggaggttcgctggagcccaagagttcaagaccatcctgggcaacatagagagaccccgtctctactaaaaatacaaaaattagccagacatggtggtgcatgcctgtggtcccagctactctggaggctgaggtaggaggatcacttgagcccaggaggtcaaggctgcagtgagccgtgatcatgccactgtactccagctggggccacagagcaatactcagtctcaaaacaaaataaaaaaacccacaggtgaggtcacatcaggcttttcccctttattctccctaagggctccacaacatcagaaatgggtttctctatcagtgcatcctccagattctactttttttttttttttttttttagtagaggtcttgcttatacccaggctggtttcaaactcctgggctcaagcaatcctcctgcctcattctcccaaagtgctaggattacaggtgtgagccacccacacccagcccagatactgggccctgtccgtcaatccatttgcagtcaccaagcaccagctgcgtgcaccgcattgtgccaatgtctggaaggatgctcacaactatcaacacagataactaataatatcaacaataccacagtgtaaatgcaaagcaatatgtgcctggtctcatttaattctcacatcaaacccttgggatacatatcattagcaccctcatttgctagagaaaactcagttctgagggtggatgatttgccaaggccctgggaattcggactaactcccttcataggtggctgcaagtgcctgtggcccagacattcccatagataggtcattttctcacaccagcttatatttcttgtgccagacacagggtccaaacccatttgcattacgtctctgagacttcacaagaccttcctgtgaatttgttaccattattattattattttcttgttttacttttttttttttttttttttttagaccgagttctgctcttgttgcccaggcctgggtgcagtggcgcaatctcggctcaatgcaacctccacctcccgggttcgagcgattcttctgcctcagcctcctgagtagctgggatgacagacacacaccaccacacctggctaatttttgtatttttagtaaaaatgggttttcaccatgttggttaggctggtctcaaacgcctgacctcaggtgatccacctgcctcggcctcccaaagtgctgggattacaggcgtgagccaccgcgcctggccttttttttttttttttgagacaagatctcactctgtcacccaggctggagtgcagtggggcgatctcagctcactgcaacctctgcctccctggttcaagtgattctcctgcctcagcctctcaagtacctggaattacaggcacgtgccaccacgcccagctaatttttgtatttttagtagagacggggtttcaccatgttggccaggcttgtcttgaactcctaacctcaactgatgcacctgtcccgacctcccaaagtgctgggattataggcatgagccaccgcgcctggccttattattcgtcttcttagtctgctttcagatgaggacacggagccacaggagttacaagggtggaggtgctgggaagtcaggaccaaaatcagcctcctgactccccatctcattttctcaatcatcatgggttttgccccccaagaagagaaccagccaccatgggtgctaaaccggtggctgatatagcaaagtgtgttggagcagagatcccagcgggcttcctagaggaagatcacaaaaaatgggcagagcccacaaggcacagtacaggtttcctctctccagtccacataagggcattcaccaggaacctgggggctgggtggccttggcccaaccctctgaaactcaccctgtggctcctcactcaccagatggacacagcaggaatctgtcccacctggctcagggagggcctacccccacctcccaccccaccccacaggcctgtttgcatgccaggccagagttggccacatgcccacatatctctcctcgttctgcaggctccgggaaggaaagtccaaggccaaggttatcatggggttcacataccttaaggggtgggtggaggggttggctcacaagctacaggttattcaatgcagtgctattcgtgatcacaaaagatcggaactgatctcacgtccatcatcaggggactggactaagatattttggcacaaccacatacgactcaagtgtcaagggaggaagagtgggggagtcttgaataaataacaaaagctggcgttgacacaggactttgcacatggtggaggctccttgcaagtgctttgcatgttattaactcattcaatccttacatcaccccaggaggaggaaccattattatctgtttaaaatgcctgtaatcccagcactttgggaggcccaggtgggaggatcacttgagttcaggagttcaagaccagcctgggcaacaaagtgagacttcatctctacaaaaaattcaaaaaattagccaagcctggtgatccacacctgtagtactagctattcaggaagccaaggtgggaggattgcttgagcccaggaattcgaggctgcagtgagccaggattgcaccactacactccagcctgggtgacaaagcaagatcctgtctcaaaaaaaaaaaaaaaaaaaaaaaaaaaaaaaatatatatatatatacacacacacacacacagagagagagagatacacatataatattttaaaatatatatacctcaaaaaatatatatataatatttaaaaatatataaaatgagggtgccacttggttgagtttatggttaaaaaaaagaataaaatttaaaaaagaggcaccaagaagtgaagtttcttgccccaggttcatggccaacaaacagtggactgggccgggcacggtggctcacacctgtaatcccagcaatttgggaggctgaggtgggaggatcgcttgagttcaggagttcgagaccagcctgggcaacatggcaagatcccatctccactggtgcagtggctcacgcctgtaatcccagcactttgggaggctgaggtgggcagatcacaaggtcaggagatcgagaccattctggcaaacatggtgaaaccctgtctctactaaaaatacaaaaaaaaaaaaaaaaaattagccgggcgtggtggcgctcacctgtagtcctagctactcgggaggctgaggcaggagaatcacttgaacctgggaggcagaggttgcagtgagccgagatcgcgccactgcactcgggcctgggcaatagagtgagactctgtctcaaaaaaaaaaaaaccgtctctactaaaaaactgcaaaaattagccaggcatggcggcatacacctgtagtcccagctacccaggaggctgaagtgggaggatcacccgagctcaggaggttgaggctgcagtgagccaagatcacaccactgcgctccagcctggcaaccagagtaagatcctgtctcaaaacaaacagacaaacaaacagtagacctggaatttggtgcaagcagcagggccagatccatgcttggtcctctcctcccagcatctctgttttgtcctgggtccctctgccaggagctccctggaacccgggaaggaagagaagcatgcagacaagcgtcagcacccccaccctccgctggccttggggagcaggtgtcattagacgaggctcaactgaagcctgcatctgaaacagattctcataactcaggcgctgtggtagccaacttctctctacagtcaattacggccagcggggcccactgattatttttatagcctttcctggagtcatgacaaggaaaactaaatgatccacaggacccctttcatcactaacagccgggtttcacggttgggggtggaggaaggaaagaaaaatcacttttttccccactttgagttaatcaacagaactcaagtctgggcagccaatatgttggtgttgagaaaagctgttctcaagcagaactaattggcaacagaaatggaattttcttccccacctccctaaaaaacataaacatgctttatcccagagaattacccttcagaataggtattgcagacgtgtcgtgtgcagccgcctgtgcgaggctggtaatctcacgccgacctggccaaaggctgcctgtgctggttacagctcaaccagagcagcctcttacgcaatacaatggtcatgaaggtcagtggcccaaaccagcccagccagaccagagtggacacttgctttcctgatgcccagcacctatctcctgctcctacgaacagcctttggcttttgttgggtcggggggtgggagggcaccctgatttgcaggtacaagtgtgagtggcattgataccccctcaactccagagatgagctctgacaggcgtaagccaaagaacatattccggggaaatttcaagaaggggcatatgacctaacaagaaacaatagctggcacagtggctcacaccttaatcccaggactttggggggctaaggcgggtgaatctatttcagctcaggagtttgagaccagcctgatcaacaaagtgagaccccagtctctgcaaaaaataaaaactggctgggcgtggtggtgcatgcctgtagtcccagctacttgggaggctgagatgggaggatctgcttgagcccaggaggtggaggctgcagtgagccaagattgcaccactgcactccagcctgggcgacaaagccaaactctgtctcaaaaaaaaaaaaaaaaaagaaaagaaaagaaaagaaacaataaggcactagaaaaaaaaaaacatataatgaggcttctggaaaagatagctctttttattttagagaaattgaggttcaaagacgtgatgtaactgctcagaggtatacagtgaggtggtaggggatccagggtttgaacccaagtctgtaggactgaggagtttgcaacccttcactgcaggcgctactgaaaggcagcataaaccttggacgaagccagaagagctggattcaaacccagttctgccatttactccctgtgtaatttcaggcaagtcacttaacctctctgttcctcagtttccatatctgtaaagtggggcttctaagggcacctccatttgcaggatctgagaggtaaataattaacagcaatatctgtaaagtgcatgcaacagtgcctgtcacggaccaaggattcgccccttcctcaccacaccgttccccacacgcgttgagaaccagaccaaataaaaggaggtggaggggaggaaggaaaagttgatgttatcagatctgtaatccctacgccatgtgttcctttctgtagcacagctgccaggcttgcctctcctgcaggagaagctgtgccacaaagatgtgggacgtcacaaacacgcagcccattcaaggcttttggacattccagccccgtccttgatgtcagtcaagatctagggcaaattccacccattcaggtggcaaaaagtaagatgtttgacaaatgccatgtgtagagggtggcttgtgaattggtacaaccattagaagataattcagcatacgatttcatattccagcaattctacttccaggtacaaacttgagacacactcctgtatgtgtgcaataggacagtacaagaaccctcaaagcagaaccgtgtatgtagcaaacaaaactgacaaatggaaacaacccacatggtcatagacaggaaaaataaatgctggtatgccatggaatagtacacagcagagaaaagtgaatgaacaagtgataagcaattatatcaacgaattttagcaataaaatgatttataaaaatgtaagtgcaggggctgggcaccatggctcacacctgtaatcccagccctttgggatgctaaggcaggctgattgcttgaggccaggagtttgaggccagcctgggcaatatgcaacatggcaaagccccgtctctacaaaaacgtagccaagtgtggtggtgcacgcctgtagtcccagctaccagggaggctgaggtgggaggatcacctgagcccaagaagtcaaggctacagtgagctgagattgcaccactgcactccagcctgggtgacagagtgagaccctgtctcaaaatatgtgtgtgtgtgtgtgtctgcatgtatgtgccagaagacaagatatatctttacgtaaagttcaaacagcagtaaaagtaaatgatatattattttggcatacatgtaagtgataaaactttttttttttttgagacggagtttcgcactcatcgcccaggctggagtgcagtggagcaatcttggctcaccgcaacctctgcctgccatgttcaagtaattctcctgcctcggcctccctagtagctgggtttacaggcatgcaccaccacacctggctaattttatatttttagtagagacggggtttctccatgttggtcaggctggtctcgaactcctgacctcaggtgatctgcccgccttggcctcccaaagtactgggattacaggcatgagccaccgtgcctggtgataaaactatttttttaagcaagggaaattgagaagatgaaaatgttctggaaatggatggcgctgataattgcccaacattgtgaatgtgcgtaatgccgctgaattgtacccttaaaatggctaaagtgataaattctatccacaatttttagaaaggcaagggaaagctaaacacagaattcaagatagcagctactaccacagtgagagagggagggaggcaagatgggaaaagagttcggaagttgatataaaatggttgtctgagttccagcacgcaggtgggaccatgggttcacaggcatttatcattttataaatagctataaagagattgttagatggaagtgtaggtggggctgttcaggtgccctttcagtatgtcattatggaattatgaatcattcaatcctacttactttttcttttttttttttctttgagacggagtctcactccattggccaggttggagtgcagtggtgagatctcagcttgctgcaacctccagctcctgggttcaagtgattcttgtgcctcagcctcccgagtagctgggattacaggttcatgtcaccacacctgtcttatttttgtatttttagtagagacgggctgtctctactcctgttggtcagactggtatcaaactcctgactgcaggtgatccacctgcctcggcctcccaaagtactgggattacaggtgtgagccaccacacctggtcaattctacttacttgaggtccatttttaaaattctagaggaggccgggtgcagtgtctcacacctctaatctcagaaactttgggaggccaaggcaggtggatcacctgaagtcagtagttcaagaccaacgtggccaacatagcaaaaccctgtctctactaaaaatacaaaaattagttaagcgtggtagtgtgcacctataatcccagctactcgggaggctgaggcaggagaatcacctgaacccgggaggcagaggttgcagtgagccgagattacaccattgtactccatcctgggcgacagtgtgaggctccatctcaaaaaaaaaaataaatccctaccttcaggaaactcacattccagcaggggacacttaagaaaataagaatatatatgtatgttagatgatgagacgtgtgtggtaaggagaaaaataaaccagaaaagggatgaagaagaccagggagtgaaggaagctgtaattttaaatggagagtcaggatggcctcgctgcaaaggtgatgtttgtgtaaagacctgcgcgatatgaacaagtgggccacttggatatctgaagaatgagcacccaggcatagagaaaagcgattgcaaaggtcctggggcaggactgtgcccgacctcaagaacagcaattgtggggagtgggaaggaggagagataaggttagagaggcctgggccctgcaggccttgtgggccgtgatgaggactttgcctgtgctctgggcaaggtgggaccagggctggagataggaggtgtcctgaacagagaaggaactggatctaatttcattttaacaggaccctgctggctgcacacggagagtagaccaggagggaggcaagaggagaagcagagacactggtggggaggcaactgcaatagcccagagagagacaccatggccgctgggaccagggtggagggagcggaggtgacagagctgtcagcttctgggtgcaggttgacaggggagccaacggaatttcttttctgttcctctttgtttttgagacagcgtctcattctgtcactcaggctggattgcagtggcacaaacatggctcattgcagcttcaacttcctgggctcaagtgagcctcctacctcagtttcccgagtacctgggaccacaggtgcatgcaaccacacccagctaatttttaaaaatatgtttgtagagacaaaggtcttgctatgttgaccaggctggtcttgaactcctggtctcaagcgatcctcctgccttggcctcccaaagtgctgagattgtaggtgtgagccaccacgtccagtgtagaatttcttttttgctggaaagtgggagaggctgggctctatttaagtgtttaagggtcaagaaagtttgagacctggttataaagtagagacatggccatccaaactgagcccttcttgagagctgatgatgggatagaatttttttttttttttttttgagatggagtcttgctctatcacccagtgcagtggcgcgatctcggctcactgcaacctccgcctcccaagttcaagcgattctcctgcctcagcctcccgagtaactgagattacaggagcccgccactgcgcctggctaatttttgtatttttagtagagacggggtttcaccatcttggccaggcttgtcttgaactcctgacctcgtgatccacgtgcctcggcctcccaaagtgctgggattacaggcatgagccactgcgcctggcctgatgggataaaattttttaaaaaataggctgggcacggtggcccacacctgtaatcccagcattttgggaggccaaggtgggcggatcacctgaggtcaggagtttgagaccagcctggccaacatggcgaaacccccgtctctactaaaaatacagaaatcaggcatggtggcatgtgcctgtaatcctagctactcgggaggctgaggcaggagaatttcttgaacctgggaggcagaggttgaagtgagcaggatcacgccactgcactctagcctgggtgacagaacgagactctgtctcaaaaaaaaaaaaaaaaaccctcctcttctaggacttctgtgatgtgggcattaaaatgaatgttttaggtcttcatgggctcacatggaaaaatgtccaggacacctgttggttgaaagaaggaagatgcagaataaaatgtatagaatgatcccatttttgaaaattaaaattacgtgacaaagaaaaaaataggaatgaagtgaatgaatggcctgaaagcatagacgcctggctctttctttgttttttttaagaaggagtctcgctctgttgccccaggctggagtgcagtggcgcaatctcggctcactgcaagctccgcctcccgggttcacgccattctcctgcctcagcctcccgagtggctgggattacaggcgcccaccaccatgcccagctaattttttgtatttttagtagagacggggtttcactgtgttagccaggatggtctcgatctcctgacctcgtgatccacccgcctcggcctcccagagtgctgggattacaggtgtgagccactgcgcccggccaagacaacgggctcttaacaggggtggcccagggtgagtataggagctactgaggtttaaactcaggcgcgcccttcctacctcgcaaaacaataaaacacgcatgcttggggccgggcatggtggttcatgcctgtaattccagcacttttggaggcctacgcgggtagatcacctgaggtcaggagttcgagaccagcctgaccaatatggtgaaaccccatctctactaaaaatacaacaattagccaggtgtggtggtgggcacctgtagtcccagctactcaggagctcctgagacaggagaatcacttgaacccaggaggcggaggttgcagtgagctgagatcgcaccactgcactccagcctgggcgacagagcgagactctgttaaaaaaaaaaaaaagaaagaaagaaaaaaaagtgcacgttttttagttctcttttaaactgctgtgggcatggttctcctcttgtattgcagttgcgtttctcttagctaatgtcccacctgggccttgtccttggcctggactataagagagcggaacttgagaatgagaaatattttcctctcgtgcttgctggcttaggcccttaaaactggaaagggcccacctggctcctagagtttctaaaaatagcaagctatctgaacttttcctataggtttggcttagccgttcctctgacttgttccaagatgccatttctgttagggcatcattcgctgtgcatgaaaacaaaggatggcaggagacagactagaaacggaagaggactaatcgggagccgctgcggacagaatccagaaatgccctgcaaatgcagacacagtggacgcaatggagagtgcataccagggcctgtgtcgctggtggagctggggcccacatgccgctagtgtagacaggatctctactccacccgatctctctgcatccactccagtgcttcgggcaagagagaggagtttggctgctggtttaagtgagatggggaaattgaaagatttgcatccaaggcccatgcctggggtctgaattcctttggaagaggactgaggactgttcaggagacgatttttgacaatccagacacaaccatagatgctgtggaaccagtggtatgctggcaaaggtttagcaaccagctctccaagggaaagtgagtgtgtggtgcacaagtgtgcatgggcgagtacatatatttgcatatccacacacacatatacttcggtttattataaattgtattgacgtaggctgggcgcagtggctcgtgcctgtaatcccaacactttgggaggctgaggtaggtggatcacttgaggttaggagttcgagaccagcctggccagcatggtgaaaccctgtctctgccaaaaatataaaaaactagccaggcatggtagcgggtgcctgtaatcctagctatttgggaaggtgagacaggagaattgcttgaacctgggaggcggaagttgcagtgagccatgattacgccactgtcctccagcctaggcaacagagtgtgactccatctcaaaaaaaaaaaaaaattgttttgatgtaaatgatgtgcagcacacaatttacaaataaaaataaaacttacaataccttttcttttataaatgtaatataatcatttcactcacaggtagcagttttgttgatttttgcccccagcaaaatctgtaatcaacctatggttacaattgatgaaggagtgtaattcttcagaaataccagttaatattttcctttctaaaaaatttctaattatttgtttatgtatttttatttttttgagacagtgtcttgctctgtggcccaggctggagtgcaatggtgagatcacagctcatggcagcctcaacctcttgggctcaagcaatcctcccacctcagcctcctgagtagctaggactacaggcacgcaccaccacactcggctagttttttctcaaattatttgtagaaatggggtcttgttatgttgcccaggctggtctcaaactcttgggctcaaatgatcctcctgtctcagcctcccaaaatgctggaattacatgcatgagtcaccacactcagccttgactacctttgtttttcatagaatttattgaattgtaagttcatataatttaatttttaacaatggtgtgtttagcaacccgttcacctaattcctgaaaatctgacaatcagctttcacaagctggcacaagctgcctccagcacacctctgtctggggacaacatggcaaagaatatcaccgaactgaggaggaagccattctcttcacatctgcccagaacccagggtatctcaagcactaaacagcgggaagctttgggagtttacagagatggcaccatggacgctgctgtgctgggcagggaagcatctccaaatggcctcagaggaaagaggaagcaggaaggatgaataaaactagagactggttcacaaaggcactcgaaatacccctttggagctccccaggatgaactgggggaccctggggggagcactgaggttctgatggggaaaacctcagcaaccagtgggcatctgggccaaatcacttagcacaaacgctgagccacaaaatcatgatacgctttcaacaacccattaggcacctcagaagctgcagggccatagggttgttacaaccgacacccatgcaggtggtaccacaggccatcagtccttttccccaagtccaccttcattcccgcctcctccagtaccatcctggacttctctagggaagtggtggggagatttactcctctccaaacttcttttttttttttttttttttttgagacgaagtctcgttctgttggccaggctggagtgcagtggcacgatctcagctcactgcacctctccctccccagttcaagtgattctcctgcctcagcctcccaagtagctgggactataggcacgcaccaccacggccagctaatttttgtatttttaatagagatgaggtttcaccatgttggccaggctagtctcaaacacctgacttcaggtgatccgcctgccttggcctctcaaagtgctgagattacaggcgtgagccaccgcgcccagcctcactccaaacttgatcttactctcagacatcttactctcagacgcttaagttctcagttcggaacttaagcgctcttcaaccagactcatggaatctcagggttgcggagagattttagaggtttcctgaaatagtccctttgttttaaagacgaggaagctgagagaagggaagtgacttgctcaaggtcacagagaaaatccagggtggaactgggtagggtgaccaattgtcccagtttacctgggactgggggggcttctggacaagttgctcccagatctgagaccacaactcagggctgacttgtccccaaggtgggtggtggggggttcacagccagtccctgaaaggaaaggaggcctggatcagtacagagctgctttgggatggaattttccaagggaagaaaaaagaaaaggccacatctgggtgctgggacctttcactctggcccgatgcctggaaccccagggattccccacctgctgtgtgtttcctggcccttgagtgtaacctgcaccctccctttccgtgccagggagacacgagctgactttatctgtctcttatctcttggctgctgccagccacagctgcagggatatatatgcaaatagcttacgataatattaatatgtgattccccccaggggaggcatgtggaaagcgctgtatgcgtttcacaattctgtttcatccaaaaacactgcacgggcccagagtgattcgaaacagattttctgcaaaggcaaaataaaattggaacaaaacctagttgaggcatatgccagtctccctgcccccagctctctccacctctgacatattaaccctcttctctcatgcccccaggagcctcctacgacaaggcagcaaatctaggaaattgcactgggcactcttcgttcaagcctggagcccctgccccatcccagggcagccagcctccaccctgggctgacacatcctttagagagtaaaaggctgcttgccagtgtcagcctgtcactccttctgtcccacctctgcctccttcctgcaggtaatgctccatccatacctccttctccttcacccctgctgcttgggataattgcagaaccatggagcacagaatacagaatactgggggtgtacaggagagtttagccaaagcaagtcagaaaaacctaggtcttttttcgtttctgccactgaccggctgtgtgacctcagcaagtcacttcacttcgcccagctgctgtttcctcagggtacaatgaggacaccaataatacttaccctgcagggggcttaccgggatttcccgagccgacgcttcaaaaatgcctacacagtgcctggcgtatagcagatacacaaggaatagctgtcatcatgagaatctcttaaagatcacctagttcaaccactgttttagaaacggacaaatggaggcctgcagagggcaaataacttgcctaaggccacacagcacgataccgccatcccatctcagcctcaacccaggttccctcctccggccttgggagctccaggtggcctgtgaggaacggctgcctcctcctgtcacccccagctccagaagtctgtccacacaaggcggcgtcacggcacacatggggagcagtcacttcacactcaccatcgagcaggtctggacactcgagtgcagtcccgccgccctccttgcagctgcctcactttccctattgccgccagcaagcgtctgctcccatctggcccgggactcccggactcgagctagggctctgcaaattccatccacactggccaccagccgctggtcccgctctctgggaagatcgccttgaggacctgctgcgccccgagtcttccttctggtgcagggaggccggtgccctgccgggctctgataatgcagccgggactcttatctggcctgtgtcagggtgcaggcggccatggagctggggttccaggaagccctcctggggccccccagccggccccgctccccccggatgccgcctgctgctctggacgcggccgattgcttgtcagtgtcactcccagctctgccggggggaattccatgctggcccccagcaggcggggcccccaccccttcacgtcccaccccccactcccattttggcaaggggactgggaaaaggcagctaatttcaagtccgcacagcgtttgtggtcgtgtcctgaatcctccacgattaatcacagagcatctgatttctgctttgcctcagagaggggcggaggggacgcctggaagtttctgtttactccattctgcaccaggctgcgtgctaatcacaaacagactgggacgcagcctacccctcctaaactgctcttggccaccccctccctcctccagccctctccttcctcttcttaccttgtcactttcctccagccccttcctcactctttctcctttccctcctttctttcccctttcccatctgtccgcctcttcagtccagatctgatccattgcacaccccttccttccgtcctgggtttcccccaagcccctttccccctttgcgcctcccacttctcctagattgagagtcagcttggttctttcctttacatccattagtgagggtcaggctcttttgttatgtttttttttcttttgtataacttaattatttcagggttcggggtgggcgctcgccccttgcccagtcacactggtgtgtgtgcgactcctacaaagttaacagtttctccaggtcaaggggtgggatccaggcttggtgatgtgcacaatttcttttgtccacttgacacatctctgcgtcctgattctgctcagggacggacccaagaacaaagcagccatttaccgcctccggaggggaggccagccctgtggcacatccagggccttggaacacctagagacagatttctctccctcgccttggctcctttccactctgcagctagtgtggaaaagaaaccagaaataaacagcaccaaagaacaggaacggacacccctccccattaaagcacacacacagactctgaagggtaatttggcaaagacctctgaaaaccagagatgagggtctcctactacttatgcctgtgcacaggagacaggcacagagatgcttgctgagagctgcttatcataggaaatgatgggaaataactgaaatgctcatccaataatgactgcttgaacaagatgtgaaagatatggtacatcaggcagcggttttttgttttttgtttcctgacaatgggccttgtctgtcatccaggctgaagtacagtggtgtgatctcagctcactgcaacctccatctgctgggctcaagcaatcctcctgcctcagcctcccaagcagctgggaccagagacgtgacccaccatgcctggctaatttttttaaaacattttttgtagagtcagggtcttgccatgtttcccaggttgggatgaggcagcaaggtacttttttttcttatttttttatttttaaaaataaagatggtgtctcactatgttgaccaggctggactcaaactcttggcctcatgtgatcctctcatcttgttctcctaaagtgctaggattacaggcatgagccactgtgtcagcttagccagcagttttaaaagagctatgtctgtattgaagagcagaggtggatctccaagacatattactgagtgaaaagggggtcagcatgatacatttggtagaatgctgattgtgtaacattccccctttacacacataaaatgaaacactgtggaaacacttagacagcaagacaggctggaaggatgtaaaccaaactgagttgctacctctgggaaaagagtttgggagtgacgcttttacctgtaatcctttcatttctaaaagtgagaatagattggtctgttacttttgtcccagccatcttccttctttttaaaaaatgtgttttattttttatttaaacggagtctcgctctgtttcccaggctggagtgcagtggcacgatcttggctcactgcaacctccacctcccaggttcaagcaattctcctgcctcagcttcccaagtagctgggattacaggtgcctgccaccacgcctggctaatttttgtatttttagtagagactgcttttcaccatgttggccaggctggtctctaacccctgacctaaagtgatctgcctgtcttggcctcccaaagtgctgggattacaggcataagccaccgcacccgacccatctatcttctttggggacattgcacccctatgtggagaaaatttcatcccaaccgtttgcttccttggactaaaataattctaccataggtcaggtcagaaataaacagcattctgcaggaagcagtggctcatgctcctgtaatctcagcactttgggagcctgaggtgagagggctgcttgagggcaggagtttgaaaccagcctgggcaacatagtgagaccctgtctctattttttaaattaataaaataaaataataataattaaaagaaagaaagaaacaggctgagcatgggggctcacacctgtaatcctagcactttcggaggccaaggcagacggatcgcttaacctcaagagttcaagaccagcctgggcaacatggtgaaaccccatatttaataaaagtacaaaaaaaaggccgggcgcagtggctcacgcctgtaatcccagcactttgggaggccgaggagggcagatcacctgaggttgggagttcgagatcagcctggccaacatggagaaaccctgtctctactaaaaatacaaaattagccgggagtggtggcacatgcctgtaatcccagctactcaggaggctgaggcaggagaatctcttgaacccaggaggtgggggatgcagtatgctgagattgcaccattgcactccagcctgggcaacaggagcaaaactccatctcaaaaaaaaaaaaaaaaagtacaaagcaataattagctgagcgtggtggctttcacctgtagctccagctacttgagggggctgaggtgggaggattgtttgagctcaggaggcagagtacagtggtgcaatctcagctcattgcaacatctgcctcccgggttcaagcgattctccccgctcagcctcctgaacagctgggattacaggcacagtgagatcccaccaccatactccaacctaggtgacagagtgagaccccgtcccaaaaaaaaaaacaaagaacacccccagcccccaccaaaaagaaagaaagaaagagaaaagaaagaaagaaagaaaggaaggaagaaaagaaagagagcgagagacaaaaaagaaaagaaaagaaaaaaatgaaaggaaggaaataaggaagaaagagcaatccttaggggtgaacccagaaattctgcaaacattctagtttgaatcacctccggttagatgtccagacccatgagccaacagtgacttattccagagtgaaattccttcagggtaggagagccatcgagttagtttgtagtgggctgaagtctcctggaaatgaggtcggcagatatatattggaaagcaaagatttggtttcaggaagcaatatcacctactctaactaataaaacacaaaaaccactttgaagcattttcaaggaatgaatatgaacaagttcagacattatgcaaagggcagttgagaaagccatttcatttcagccacttcccaccccctcactgactaaatatatggccacatgcatctcaccgacaggacgggcaaataaatggcccttgtgttcatgacaaggagctgtggatagaattctgcagtgtgctcttttctgtccatcacttgttaaacgcctgccagctttgggaaaacagctaggggagttactagacaagacaaatgatattccccacagccccccatcccccacaaccaccaccaatcagggcacccagccctgaccccatcttccagggcagaaggaagctccaggtttggagcccggcagcctcaggtctgggtttccagccttcttcggatgtggcacagccagacctttcagtgtttctcaaagtgggcctcccgaaggggtgccacccaagctgactttagatgacacacagactgggcactaaacactgaatctcatagtgagaaagccatttccctcctatgaccatgctggttcaatgccatttggccgggagaaagtctcagcttgagctagcctgtctttaacacctaacattggccaatctccctttttaacaaagagaaagccggccccacgcttaggtcattccactgctaacagcatctagctagaactgtgtttggcaattgatcatggttttccatgaacattctatttttttggtgttgttttttttccagtttaaaagtgaatccaccagataagggaaaagctaacaaaatcctaataaagtataaagttaaattaacaatagtgtaactataatggttcattggtcttgacaaatgtaccatagtaatgtacgatgaacagttaagaaaaacaataagaaatccgtagagggtggatagagccctctgtactatctttgcaacttttttgtaaatctaaaactattctgaaatagaaagcttatttaagcctggttgcagtggcccacccctgtaatcccagcactttgggagaccgaggcaggtggatcacctaaggtcaggagttcaagaccaacctggccaacatggtgaaacccccatctctacttaaaatacaatacttagtcgggtgtgatggcgcgggcccagctacttgggaggttgaggcagaattgcttgagcctgggaggcagaggttgcagtgagccaatatcgtgccactgcactccagcctgggtgacacagcaagactccctctcaaaaaaaaaaataaaagaaagaaagaaagcttatttaagtacctttagtgccccctaccataaatctatgtttttttttaagtgtatatatggagagaaataaagagaaagcaaattgtaagctaggcgaggtggctcacacttgtaataccagcactttgggagaccaagggaggctctcttgagtccctggagtttgagaccagcctgggcaaaatggaaaaaccctgcctctattaaaaaaaaaaatacaaaaacttaggtgtagttccagctacttaggaggctgaggtgggaggatcagttgaacctgggaggttgaggctgcagtgagccatgattgtgccactgcactccagcttgggcagtgtctgtgcagggtctgctgggcaacggagcaagaccctgtctcaaaaaaaaaaaaaaaagaagaaagaaaagaaaaagcaaattgtggcaaaaatgttaacaattggtgaatctagctaaggggctatatggatgtttttcacactattctttcaattttcctgtaggtttgaaatttgtcaaaatgaaaaattgtagggggaggacgttaatcaatttaaatacaaatattaagtacataagagcccaggttgcaaatgaatatggccaaagttgtgaaggtgggacctgagttggtggcatttggtggaccctaggctacaagatagcctggcaaatagcagggacaactgaaatgattttttttttttttaaagagacagggtccttgaactcctggctcaagtaattctctcatctcagcctcctgaatagctgggactacaggctgaaaccaccgtgcctggctaattttaaatatacatatatatatatacagagagagagaaagagaaagagaaagagagagagagagagacggagtctcgctgttgtcggcccgggctggggtgcaatggtgagatcttggctcactgcaacctccacctcccaggttccagcaattctcctgcctcagtctcctaagtagctgagattacaggcgtctgccaccaggcccagccattttttgtatttttagtagagatggggtttcaccgtgttggccaagctggcttcgaactcctgacctcaggtgatccacctgcctcggcctcccaaagtgctgggattacagacgtgagccactgcacccggccttctttttatttttttgagacagaatctcgctctgtcacccaggctgaagtgcagtggtgagatcttggctcactgcaatctctgcctcccaggttcaagtgattctcctgcctcagcctcctgagtagcagggattacaggcgtccaccaccacacccggcttttagtagagacggggttttgccatgttggctaggctggtcttgaacttctgaccccaggtgatccacctgcctcagcctcccaaaatgttgggattacaggcatgagccaccccggccggactatatatatattttagagatgaagtctcaccatgttgcccaagttggtctcaaactcctggcctcaagtgatccttctgcctcggcctcccaaagtgctgggattacaggtggtgcctggcctgggatgatattaaacgacctcgcaagtccctgagcacccacacccactctccattaccccagaagcttcaccatccatgagggttcccccacataggtgtccttggagagtgcagagggcatttcaagagctcaaagcatctgtaagccttgtagtgagtcgagggaccaactttcatctcccaccccttgacaaccagagagtccctctccctctcccaagcctccacatgcatacactctccaaatgctgcagcatttctcacactgtcaaatgatttctgcacctctattcatcctagagcattctcatcctgttaagagggcaggaatattcatcccagagtctagaacaaggaagaaatactcaagagtggccaacacctgtaatcccagcactttgggaagccaaggcaggaagattacttgagcccaggagtttgagaccagcctgggcaacatagcaagacccccatctcaacaaatactttttaaaaattagccgggcagccaagcacggtggctcacacctgtaattccagcactttgggaggccgaggcaggcagatcatgtgaggtcgggagttcgaggccagcctggttaacatggtgaaaccccgtttctactaaaaatacaaaaacttagctggggtggtggcacgcacctgtaatcccagttactcgggaggctgaggcagaattgcttgaacctgggaggcagaggttgcagtgagccgagatcgtgccactgcactccagtttggacaacatgagggaaactccatctcaaaaaaaaaaaaaaaaaaaaaaaattagccaggcatggtggcacgtgcctatggtcccagctactcaggaggctgaagtgagagaatcttgagcctgaggagtggagcctgcagtgagctgtgatggaaccatgcactgtagcctgggtgacggcaaaaccccgtctcaaaaaaaattttttaaaggaagaaatactccagtgggagacagacatataaataaggacccacggccaggtgtagtgtctcacacctgtaatcccagcactttgggaggctgaggcgggtggatcatttgaggtcaggagttcaagaccagcctggccaacatggtgaaaccctgtctctacttaaaaaaatataaaaattagccgggcagtggtggtgtgcgcctgtaatcccagctactgggaggctggggcaggagaatcgcttgaaaccaggaggcgaaggttgcagtgagccgagatcacgccactgcactccagtctggacaacagagtgagaccctgtctcaaaaaaaaaagaaaaaaaatagggacccacaaaaccaagtgctcagtgcaggggcagagcagtagaggcagggggatggacctctgcctttgaggaccaagggggtatcgcaggaaattatgtcaacagggtcttgaaggatgagaaaacagaaagcttccccgatctttctagattgatactctgacctggccctcaagggagggccatgcccggcagcttaagggtcctgcagagccttttggtctctgaccccaaatccactggaacaatctcagtccttttaaggtgccagcctctctcctgtgtcctgtggttcccccagcctggatctctgtaggtcccacccaccttgcctttcacctggttaataccttaactcaacccgctggaatccagctaaggagtctcaatctcccacagccttctccaagcccccactctgggcacagtgctcctctaccaagcatcctggctgccccatcagggcagaactgggtgagcacatggaccctggagttccatcctggcttctccgcttctgagctgcatgactttgggcaagtaacttggcctctctgggcctccatttcctcatctgtaaaatggggatgacaacagtgccgcattgcgctgctgtgagcattaggtgaaataatacttggcttctcgatgtgtatacagaccagcagattgggcatcccctgggaggttgctggtgcagcatcccaggccccaccccggaactacagaaccagattctgcaatttttttttttttttttggagacagagtctgactctgttgcccaggctagaatgcagtggtgcgatctcagctcactgcaaccctctgcctcccagcttcaagcaattctcctgtctcagctctcaaggagtagctgggattacaggcacatgccaccatgcctggctaatttttttgtatttttagtagagacagagtttcaccatgttggttaggctggtctcaaactcctgacctcaggtgatctgcccgcctcagcctcccaaagtgctgggattaaaggcatgagccgctgtgcccgacgtctgcattttctcaggatctctaagtgattcacatacatgttaaatgtgacaagcactgaaacattatatgtaaaatactgagactgcctgacacatacttggctcctattaaatgtatgttgttgttatcatcatcatcatcatcatcccacagtattgcctgttttctcatcctcctccacctgagaggaaagaccacagagggagcatttaagccagccctagtcagaggagaatcaccaatcccagtggtctgaacatgaatgcctgcaaaccttgccaccaagggctacagtactctgtgtcacgactgccatgggcaccacggcatccttgtgcctagagtggagggggagcttgataaacgctgcgtgattttaagtcatttgtctaattcacatggaaaagccagactggaaccaggcaacatcactcttggctgagcccttttggactcattacttcccaatgctcaagcatcctttggatgaagagcagagacagagcctgagtttggggagaggattaggggatggtgcttaacagaaggaagagtctccaaacctattctacttggtaaaatccatcatttgcctaaggataatggcacaaaaattctcccccatgatcaaccccatctaccttctgccctgatgagaatggtcagattgctggagtctttctggagataaatattctaatccatcactactaggcgtctccgctactctcatcttcacccatcctgagcctcatttcaggcccctttgatcccatgtgactaatctatcagatagaagtcggttctgtggagctggtgaggcctttggaatgacaagctctccctctggcctcaacaaggaccgtaaaccttggttcagccgaggaatgaatctgccctgaaatctgggggccttatcagttttggagattagcaaaggccgagtcctgacctgaaagaaaatcccagacactcgccacactccctttgggactctgcaaagtcaaattttttcagaaaccaattccagttaagtaaatagtttctgcacatgagtgcccacagggttcctcagaggacctgacattctccacttggtgactgtcatttccttacaaacacaacattgaaagcgatctttgcattcccaaaatgattccgccagctgaggaattctacaattcttcttgagttcaaggctgccactttatttattgtgtgcttttatgacaacagcccctaaatgcatcctgtatgatttgataagggcctcttggccccactgcccccatcccatgtgtgtctttctttgccacaaatttccagcacactgttcaaatatgtaccacctaaattgaaccctcatgctgggagcactaatgggacgccccttcaaagcgactttctgtaacccaacagtttacatgttgctggaaacaatggacttaagcacacaatttatttgtgttggctggtttcatgctggttggaatctgctttggggggaaaacaaactctgcatctgtttagatttataatttatattgaaagcacaaatacctcataatagggctagaatgagacccagttatgggcaggagtcaccatatatgctggctttgttctttcatgaatgcactaagagattacaaactgcctttttttttttggagacggagtctcactctgtcacccaggctggagtgcagtggcacaatctcagctcactgcaacctctgcctcctgggttcaagcaattctcctgtctcagcctcctgagtagctgggattacagaggtgtataccaccacgcccggcttttttttttttttttttttttatttttagtagagacgttttgccatgttggtcagggtggtctggaactcctgacctcaagtgatctgcccaacttgacctcccaaagttctgggattacaggcgtgagccaccgcgcccagccgacaaactgctttttataatatttaagccatcctctttattcccccacgcaacccgccgcctccatccctgagaaacatctgcggcaggggccgtgccctgcctgcctgcctgccctctacacaagcactctgatctggctcttttccctgctgccctgtggaggggcctactttgtgcatagtcctggtacccaacatttgggggcttcccgggggggccagccactgttcttagtggcttgcatcaactacctcactccatcctcaccaccctcccaagcaatggcatccccatgatcagggattcctccatgatcaggatgaaactgaggcactttcccaaggtcccacagcttataagtgacagagccaggattctaactcaaagggtcttgctctagaatccatgctctcaaatcttaggtgcttttgcagcaaaatctacagaataagtagctggattgctccattgccttgacttttcattgcagttgagttggaagagaaataaggcaagtggcaagaaaataaaatatcatgcttaaaataaaatatcataaccactaaagcaaaatgagatcatgcttcccaaacgaaaccaaacaagaccaaaacaaaatctggaacagaacatattcacctgagtgcagtggctcacacacctgtaatcctagcacttggggaggccaaggcaggagattgcttgaggccaggagtttgagaccagcccaggtaacataacaagacccccatctctacaaaaaatttaaaaattagccaggcatggtggcacatgcctgtagtcccagctatttgagaggctaaggcaggagggttgcttgagcccagaaggtcaaggctgcagtgagccgtcatcgcatcactgcactccagcctggccaacagagagagactctgtctcaaaaaaaaaccaaaagggccgggcgcggtgggattacacacctgtaatcccagcactttgggaggccgaggcaggcggatcgcctgagctcagaagttcaacaccagcctgggcaacacggtgaaaccccatctctgctacaaatacaaaaaattagctgggcatggtgacatgcaactacagtcccaactactcagatgctgaggcaggagaatcacttgaacccaggagacagaagttgcagtgagccaggatcgagccactgcactccagcctgggtgacagagcaagactccagctcaaaaaaacaaacaaacaacaacaacatcaaaaccctaatcttcttcaccttcttcacctccatcttcaggcccagacaaagagatgccaagaccagaggggaggctcaggctcccagaggatcctccatctgtaagaaagagccacaggtttcaggacaaggggcagaagagcgtattccagggagcttgctgcctgaatcactacaagcagcgtcccagtaaacaggcctcctggaacccgtgcatgtgccagtgctgcctctctcatcaaaggtgagcctatctctccaaccacctgcagcaggttggcactgtgacatgctttgacacacagatgaggtggaagtgactgtgcaccactttggaaccaggcctccactttgcaccttccacctctgtttttactttttttggaatttcttcttttctttttctttcttttttttttttcagatggggtattgctctgttgcccaggctggagtgcagtggcatgaccatggctcactacagcctcaaactcctggcctcaagcaatccacctgcctcagcctcccaaagtgcattagctaccatgcctggcctgtttattggaacttcaagaccacaaatgggaaagaagctgggctagcctcctggaaggtggaagcccggctgggcacggtggctcacacctgtaatcccagcgctttgggaggccgaggcaggcagttcacctgaggccaggggttcaagaccagcctggccaacatggtgaaaccccatatctactaaaaatacaaaaattagtcgggcatggtggtgcatgcctgtggtccaagctacttgggaggctgaggcaggagaatcacttgaactcgggaggtggaggttgcactgagctgagattgagccactgcactccagcctaggcaacagagcgagactctgtctaaaaaaaaaaaaaaaaaaaaaaaaaaaaaagtgtgagctgaaagagccggtgaagtgacccattgcaagaggagggaagaatgcttgaggctgaggggaagaacctgcacaggtggttcttaccaggaggggttaggggaatctagaatctggctccattttacatataaatacagagcactttttgcatagttttaacaaacactaaattttcctggaatgcagtgaccatgtaaattgagagaggcctgtgcttaacttcgttcaggaattcaccaagcactgttcactgctctggagtaacagtcctggcagcaactccacccagccgcaatgccccacacctggatctttctgcaatggtcgctgtcacctgcaaagtgtttccacctgtgagttcaagcacctggatacttcattagaacttccagcattaaagtacatctgatttgattataagtgacctaccatttaatctcctcgattttatagtttgagaattacacatagatgttttcatgatctgagtatgtaggttatattatttatgaatttcatttcagggtagacaaggaggcactaggtctggtagggctgaaaccacaggcatcttcaagcacctcctttggctgtgtgagaagatgaaccaggctgacataagaactaacaagaggtatggagttagagctcagagggccaggagatgatgtcagaggaggatgtggggaaatcagagccctcatgcactgctggtggggatgcaaaaccatgcagccaccatgaaaaatagtctccagattttcaaaagtttaaacatagaatacaattttttttttttttgagacagtctcatgctgtcgcccaggctggagtgcagtgacagtctccactcattgcaacctctgcctcccgggttcaagtgattctcctgcctcagcctcctgagtagcggggattacaggcatctgccaccacatccagctaatttttgtattttgttttagtagagatggggttttgccatgttggccaggctggtctcaaattcctgacttcaggcgatccacccgcctcagtctcccaaagtgctgggattacaggcgtgagccactgcgcccggcccatagaatacagtttgaaccagcaattctactcctaggtatataccccagagaaatgaaaatatatgttcacataaaagcttgaacacaaatgttcatagcagcatagtcataatagccaaaaagtggaaacaaccaaaatcttcatcaactagggaacgaataaacaaaatatggtccatccgtacaatgtgatgtgattcagccatcaaagtatgaactactggccgggcacggtggctcatgtataatctcagcactttgggaggctgaggcgggtggatcacctgaagtcaggagtttgagaccaggctggccaacatggtgaaaccctgtctctacaaaagtacaaaaatgagccaggcatgatggcaggtgcctataattccagctacttgggaggctgaggcagaagaatcacttgaacctgggaggcggaggttgaagtgagccgagatcatgccattgcactccaccctgggtgagggaacgagactgtgtctcaaacgaacaacaaaaaaagtatgaactactaatacatgctacaatgaatggggatgaatcttgaaaacattttggtaagaacagaagccagacacaaaagtccacctcttgtaagactccaattatatgaaatgtccagaataggcaaatctagagagacagaatgtagaggggtggctgccgggggctagggctggggatagtggggaatgatagccagtgggtctggggcatcttttgtaagttacgaaaatgttctggaattaaatagtgatgatagttgtaggactctgtgaatctaaaaaccacatccaaagctgggcgtggtggttcatgcctttaatcccagcactttgggaggctgaggtgggaggatcccttgaaaccagcctgggcaacagagtaagaccccatctctacaaaaaaattaaaaaattagctgagtgtggtggcatgcacctgtagtcccacctacttgggaggctgaggtgggaggatcacttgagtctaggaggttgaggctgcagtgagccattatcgagccactataccccagcctgggcaataaagcaaaatcctctcttaaaacgaacaaacagctcacacctgtaatcccagcactttgggaggccgaggcaggcggatcacgaggtcaggagatcaagaccatcctggccaacacggtgaaaccccgtctctactaaaaatacaaaaaaattagccgggcaaggtggcagtcacctgtagtcccagctactcgggaagctgaggcaggaaataggaaatggcgtgaacttgggaggcagagcttgcagtgagtggagatcgcaccactgcactccagcctgggcgacagagcgagactccgtctcaaaaaaaaaaaaaaaaaaaaaaaaacacatacgaaaccaaaaagtgcatctgtaaatttaaaaaattgtaaaaaaaggaaaacaaaaaagaggaatcactgaactgtacaatttaaaggggtgaattttatggcacgtgaatgatatgtcaaaaagcaaagatgaagctgcagagataaggagggcacacctaggctaatctggagccattgagggctttaggcatcacagtggcaatacaggtttgcgttttagaaggatcactgtggaggatgaactggagatgggcaaaaacagacagctttaaaaggtgacgaagggggccgggcaaggtggctcacgcctgtaatcccagcactttgggaggccgaggtgggcagatcatgaggtcaggagatcgagaccattctggctaacacggtgaaaccccgtctctactaaaaatacaaaaaaattagccgggcgtgttggcgggcgcatgtagccccagctactctggaggctggggcaggagaatggcgtgaacccgggaggcggagcttgcagtgagcggagatcgcgccattgcactccagcctgcgcgacagagcgagactccaccaaaaaaaaaaaaaaaaaatggtgatgaagggtgaggcatttggaacaagcccggctttgggcttgagcagctggtggaggcggtgccattcacaggaatgttggcagcatcgtgttgggagcagtttgcactaacttctgtaacagaggtgcaatcacatacagggttgataagataagagctgcggctgggagaaattacttctgacttttggcatccgggaaggcatttggaagaggtggcatttaagcagaactttgcaggtcagcatagggcatacaaaaattcgaagggcagcctaggaagaatgagttgcaccagcataggtatgggggctaggaaatgcccaggtctgctgggattgtttggccaggtaagatgagaaacaacaattatgataacaaaactaaccaaaaagcatatccttccatttttcacaacctctctgtgaggcagtagcatcttttaataggagccaagattcaaaggagtccaggtgacatacctaaggttacacaactatgaaggggctggccagttttgtttatttgtccattttaagagacagggttggctgggcgcagtggctcatgcctgtaatcccagcactttccatttattctcctcgaggcgggtggatcacttgaggtcaggagttcgagaccagcctggccaacatggcgaaaccctgtctctacaaaaatacaaaaatttcccgggtgtcatggtgggtgcctgtaacaccagctactcgggaggctgagacaagagaatcgcttgaacccaggaggcagaggttgcagtgagccgatattgcaccactgcactctaacctgggcaacagagcaaggctctgtctcaaaaacaaaagagacacggttttgctcttttggccatgctggagtacagtggtgtaatcataactcactgcagcctcaacccccccaggctcacgtgatcttctcacctcagcctcacgaggagagggattacaggcatgcaccacaacaccagctaatgtttaaaaaaatttttttgtaaagatgggctgggcacggtggctcatggctgtaatctccacactttaggaggcctacacaggtggatcacctgaggtcaggaatttgagaccagcctggacaacctggtgaaaccctgtctctaccaaaaatacaaaaattagccaggcatggtggcatgcgcctgtagtcccagctactcaggaggctgaggcaggagaatcgcttgaacccaggaggcagctggagatcacaccactgtactccaacctgggtgacacagcaagattccatctccacaaaaaaaaatttttttttttttttgagatgaagtctggctctgtcgcccaggatggtctcgaactcctgggatcaagagatcctccagccttagcctcccaaagtgctgcgattacaaacgtgagccaccgcacctggctgctggccagtttttaatctcaggtctgtttgaaaaataggtacacaggtgagttcatgccaacttgtggcttgcagaccttatttttacagttaataaagtcattcttcctcttgaactagaaaacactcttctctgcatctctgttttgtattacacattccaatctctctcatctttcaatacgttttcttgagggagaaattgtgttcactgtttgggaaatgtaatctgctctacacaggagatgattaaggactcttgacacttatatgtagggatggagagtatgtatattttaggtgccagagaaaccataatctgtgaacaatatatcaattggggtgatgacagctgcttaatattaaatacgagatgtgggttctttctgctgcttaacctcccttactttgctctgagcaataaccatcaaaaacaaatacatattcgttgaatttttgtttcattctgtttgcattccagctgttgagatataatcctttttatataatacattttaaaaaaatatttgaatctttaccttgtggttttaacagccatggaaaaagtcctggctgggtgcagttggcttaatgcctgcaatcctaacacgttgggaggccaagacaggcggatcacttgagctcaggagttcgagacctgcctgggcaacatggtgagacctccctggtgtctacaaaatatttaaaaattagctgggtgtggtggcacacacttgtggtcctagctacttaagaggctgaggtgacaggattgcttgagcccaggaggtaggggctgcagtaagccatgtttgcaccactgcactctagtaggcaatagagtgagacctttgtctcaaaaaataaaaataaataataggccggggggtgggcggctcacacctgtaatcccagcactttgggaggctgaggcaggcagatcacctgaggtcaggagttcgagaccagcctggccaacatggtgaaaccctgtctttactaaagataccaaaataaaaaattagccaggtgtggtggcactcccctgtgatcccagctactcttgggaggttgaggcagggaattgcttgaacccgggaggtggaggttgcagtgagccaagaactcgccactgccctccagcctgggcgacagagtgagactgtgtctcaaaaatagataaataaataaataaataaataaatttaaaaaataatagataaaaaggctgatttaagggccccatcccaggcccagtgaatccaaatgtccaggagagattgttgtgtttcttgttgtcgttgttttgtttttgtttttgtttttttgagacagggtcttgttctgttgcccaggctggatgaagtggctcgaatatggctttctgcagcctggacctcctgggcttaagcgatcctctcgtctcagcctcccaaagtgctaggattagagccatgaaccacggcgcccaggctactctgcatcctgaccaaaccttaacatggaatctgtgttatttttgtggctgacaccaccagtgccatttgttggttccctctttgccagataaaggtaaagttgtgtcgtgctgccttgggtctgggccaaggtagtctcggcctcttagaaccatatagattttgactgatcaccccattcactcataagtgcagactacatgccagaactattttgtttttgttttgaaacaggggctcgtcgtgtcacccaggctggagagcagtgacacaaccttggctcactgctgtctcaacctcctgggcttaagcaatcctcctgcctcagcttccggggtagctgggactacagatgcatgccaccatgcgtggctaatttttgtatttttttgcagagactgagtccctctaagttgtttaggctggtcttgaaatcctgggctcaagcaatgctcccacctcggggtcccaaagtgctgggattataggagtgagccactgagcccaaccaaaactattttagatactggaaataaagcaggaaaaaaactaagtgtatgtctttcacagagggcttcggggaacttaggttctagcggggaagacagacaaagcaagtaaatatgtccagaatctgtcctgaagcagagagctgggggcttgagggagtggcagaggcaacttcgaaggacctgaaggagggaaagggtgtgggagctagattgcataaaggaggaaagatcacaggagatggaaggctattgtaaatttagcattgactctgaatgcgataagaagctttcaaaaagctttgaccggatgagggacaccatcagacaggttttaccagaatcctttctggcttgtgcagaatcaactggagaggggagggtagatgtggagagaccagagaagagtctactataatagtccaagcgtgagatggtggtggcttggaacagggtagaagatgtggacgtggtgagaaatagttggattctcggtatattttggaggtcaagccaacaggactggatgttgagggttgagagaagtgaaggagtcagggataattcctttattatttttatgatttatttatttacttatttttatttattttattttatttatttatttatttttgagacggagtttcgctcttattgcccaggctggagtgcaatggcatgacctcggctcactgcaacctctgcctcccgggttcaagcgattatcctgcctgggtagctgggattacaggcacctgccaccatgcccggctaattttttatattttcagtagagacggggtttcaccatgttggccaggccggtttcaaactcctgacctcaagtgatctgcctgcctcggcctcccaaagtgctaggattacaggcatgagccgccacaccaggcctgattgattgattgattgattttgagacagggcctccatatgctacccaggctggtctcgaactcttgagctcaagtgatcctccttccaaagtgttgggattatggggtgtgagccaccacacccagcctggggataattctaatggtagtcatctgcaagatacaactgcaaagatggagctgtgatctgcttcttgatgaagagggaggtggggagttcagtgtggaccatgttaagtgtgagatgcctactagacagaaataatggaagggccgagtaggcaactatatatgcacgaatggagttcaggggagaggctggggacagaaatatcagtgtgaaggccaccagcacacaggtggtattgaaagccatgacctggatgagatcacctggaaaagaagtcaaagaagagaagaggtgcttggacaaggaggtcctcagcattcagaagtgggggccaatcacagcttcactccttggctgggcactatggctcacgcttgtaatcccagcactttgggaggctgatgtgggaggatcgtttgaatccaagagttgaagaccagcatgggcaacatagcaagatagtatctctacaaaaaaaatttaaaaattagccaggcatggtggcatgtgcctatagtccaaactaccttgcaagttgaggtgggaggatcgtttaagcctgggaagttgaggttgcagtaagccatgatcatgccattgcactccagccagggcaactagtgagacccggtctctaaaaaaaaaacaaaacttcactccacagatgggggatctgaacgtgatcaatttagtcaccaatctctggacctcctttggtgtgctgagagtggaggagagcggaaagagaactggatttacgtccaaaagacctgccctctgtcatttactgtgggaccctaagcacagcatttcacctcttgggaaatgctgtggaaaccaaaggtggggggttggggccagagcctggagaccttggaaagaactgagtactatgctaagggagggggaagggagggggcagggcaggttgctgcccctgtagccctcagcagaggcctcctgtaactcctctggatgtggcttttagttctggcaggaggtgatgagtgtctgacctggggatgctgttacatgctaacaggggaagaccagcatgttagaggttgtttttttgttttgctttgttttgttgttttgagacatggtctcactctatcgcccaggctagagtgcagtggcatgatcatagctcattgcagcctccaccccctgggctcaagagatcctcctgcctcagcctcccaagtagctgggactgcaggcatccaccaccatgctggttaatttttgtattttttgtagagacagggtttcgccatgttgcccaggctggtctcaaactatccgcctgcctcagcctctcaaagtgccaggattacaggcatgagccactgcgcctgcctgtgttagaggtttagaatcaggcagccacttgaatatggacagtgacggagaaagagggttcaaaataaagttagagtcctggatgactggagagatagtggtgctgttatcagagatggattacatgggagatagagcagtggaagacaaatgataatacttaggacacaaagagttcagagagggattaaagtgtagggagtgtccatggaattttggtacatggccacttcttgtccttaaatagcctccaaacccacagaaacattatctttccatatcaccctaaagactgtgcagcagtgatgagtaaaatgactctgacctcaattaaatcaaaattctaggaatacaccagctcctttggagtttcttactaacgctcctttctctgtctctgattccccacttgcagctcagacagtgccctctgttggaaacctcaaccacaaatccccgtcctcgactccatggcgagaaggacctagaaggaaacaaacacctcccaggagcctttcacacacattgttctcattttatccttgcagttgcttggtgaggttactgtgtccaacctgggcaaactgaggcagctgccccaatcacagccagagcggagctgagatcggaactcaaggcggctgccttcaaagcttgtgcttcactccctctacctagctgtagctgtaggatgatttgacaagggacttgaagatacaatctcaaggacagaggtttgtttttttttgtttttttgttttgagatagagtctcgctcagtcacccaggctggagtgcaatggtgcgatctcggctcactgcaagctctgcctcccgggttcacaccattctcctgcctcagcctcctgagtagctgggactacaggtgcccgccaccatgcctggctaattttttttgtatttttagtaaagacggggtttcaccgtgttagccaggatggtctcgatctcctgaccgcgtgatcagcccgccttggcctcccaaagtactgggattataggtgtgagccaccgcgcccggctactgttgattcttttttgttggttggttggttggtttttgagacagagtctcgctctgttgctcaggctggagcgcagtgtcccgacctcagctcactgcaacctccatctcctgggttcaagcaattctcttgcctcagcctccctagtagctggtactacaggcacatgccaccacgcctggctaattcttgtatctttagtagagacgaggtttcaccagaccttggccaggctggtctccaactcctgacctcaagtgatccacccgcctcagcctcccaaagtgctgggattataggcatcagccaccgtgcccagcctctgtcgaatcttaaactaaaaaattaaagtgtgtattttgtatgtctttgaggttttaaaatcttatttttctggtaatttatttttattatattttacagcagtatccacctgcaacagttggacaatttaaaaaaccagtactttagcactctgagaggcacggggctgccggagagagaagagttgtctaaactgaggaaggtagccaggcgcggtggctcacgcctgggatcccagcactttgggaggccaagagggcagatcgcttgagcccaggagttcgagaccagcctggacaatatagcaaaaccccatctctatttaagtttaaataaagaagaatttaaagaaaaaataaggtgtggcaggtcctccatgtttggtgtatgaatgaatacatcactgaaggaatgacgtatgagtgtgagagaatcagccacatgaagaaaaatgcccagaatccaggtttctcatttagagccattcaaagggtgagagcttaggatgtcaagttcatcaccagacttgatatgcacatcactaaacctgcacccttctgattttaaagatggaggtgggagacctttctcccccaagtcatagaactgatcaacaaagaaaaaaaaataccaaaaagagccacatataaataacaagcaatatttactgctcgtgattttaaaactcagactaggttagtagactaagataaacattctccttaccattttcaccaagtaacaggaaaaacacagcccatatgcacaaacatcctattttaaggactgctggtttttgggttttgttttgagacagggtctcactggagtacagtggtgcggtcatggctcattgcagcctcaacctccctggctcaagcaatcctcccatctcagcctcctgagtagctgggacgacagtcgaatgccaccacacctggctaattttttaattttttgtagagacagggggttgcccaggctggtcttgcactcttgcctcagcctcccaaagtattgggattacaggtgtgagtcaccacatccagtcaaggactactgtttgaagtggaggcttttgaacacacttaccctgggatgatgaaactgaagagtgagcaggatttagccctagggtacaagttcctcaactaccttgaagtgcttcaactgtgcaggaaacaccttccacctaaagtttctgcctctaaacaggagcaaagatgccccactcaagaaaagttccaggcacaccttgctccgttttggaaattcccactggcactttccagaaacaagtaggtccctttaaacttaaaggcacctggggccaggtgcggtggctcacgcctgtaatcccagcactttaggaggctgaggcaggcggatcacctgaggtcaggagtttgagaccagcctggtcaacatggcgaaaccccgtctctagtaaaaatacaaaaattagccgggcatggtggtgcgcacctgtaatcccagctacttaggaggttgaggcaggagaatcgcttgaacccaggaggaggagattgcagtgagccgagatggtgccactgcactccagcctgggtgacagagtgagactccatctcaaaaaaaaaaaaaaaaaaaggcacctggaatatgaaaattgcatttttttttcctgcaaagttgtgcagtagaaagcaatgtcagagtagccctcagtcctcatcccaggctactcccattcttcttggcataaatcttttaggcaaacctatttattctcccctctaaagtgtcaatttcacatctgcaaatgggatcataataataatagtacctggattaaggtgaggattaaatagcaaaatgtgtgtagaacccttagcttgggcctgacacagtgagcctttgatgaacacaagcttggggctgtctctaatcacaagccaaaatagaaacccagagaagtctggaccagtgacagataccatttattcagcatgtgccatgtgccagaaacagtgttaagatctttattagctgttgggatgcttttcttttttctttttttttttttttaagaaacagggttggctgggcgtggtggctcatgcctgtaatcccagcactttgggaggctgaggtgggtggatcacttgaggtcaggagtttgagactagtctggccaacatggtgaaaccccatctctactaaaaatataaaaattagctgggagtggtagcaggcacctgtaatcccagctactagggaggctgaggcagaagaatcacttgaacccaggaggcagaggttgcagtgagcagagattgtgccattacactccagcctgggcgacaagagcaaaattctgtctcaaaaaaaaaaaaaaaaagaaagaaagaaaaaggaaagaaaggaaagaagagaaagaaaagaaaagaaagaaagaaaggaagagaaagaaagaaacagggtcttgctctgtcacccaggctggactacagtggcacaatcatagctcactgcagcctcaaaattctgggctcaagcaatcctcccacaccagcccctcaaagtgctgggattacacacatgagccagcatgcccagcgctagtggaattccattttttctttttttcctgtgtgtgttttttgtttgtttgtttgagacagggtctcactgtgttgtccaggctggagtgcagtggcacaaacatagctcactgtggcctcaacctcctgggtttaagtgatcctccttcctcagcctcccagttagctgggactacagtcatgcaacaccacgcctggctaatttttgtatcttttgtagggatgggatttcaccatgttgcccaggctggtctcaaactcctgaactcaagcaatcctctcctcagcttcccaaagtgctgggattccaggtgtgagccgccacacccagtttggtagaattcttagtacaactctttggagtagctactctcagtgtctcattttattttactttttatttatttatttttgagacaggctctccctcttgtcacccacgctggagtgcagtgacatgatcacagctcactgcagcctcgacctcccaagctcaagtgatcctcccacctaagcttcccgaagagcttggaatacaagtgtgtgttaccacacctggctaattttgcagagatgaggtctcactatgtggcctaggctagtctcaaacgcctgggctcaagtgatccttccaccttgacctcccagagtgctgggattccaggtgtgagccactgtgcctggccctgcatctaattttagagagccagaaaggtgaggtcccctgtccaagctctcccagctcagagagactccctgccttgctccccatcaccccacttgcatgacgttcatgctgccctcttctgtcctcttctgtgtttctcagcctgaaagcgtgggcatcaactctggctggctttgttgttgttctcaagcttctgtcatcattggtataattttacataaacttggcattcctttaaatttcagaaaatatgttcacttcttaaatatctcctgggggagataagagttctataaatgatttcgttctccccgccttcgtgttgaacttaaaaaggcgaagtcactggatctccgttaacaagtcatgttgtttattggtttattttcattttggaaactcttctccatggttaaccactcttcctcctccttaaaaattcccatgaggaattcggatcagacgctggggctgtggggcagatccccgggaggatatcatgtttctagaaggctcctggaagccaacaagcattgcaacctgactcttaactgactttttacctgtaggattatctcggggcaggaggaaaaagacacaggcaagctttctggtcccaaataaaatgatgtatttcgtgaaggaagaaagttttaaactaataatagaaattcatttgaccataaaaaaggcaatataaaagggtaaggactctggaacccaactgcttgggtttcaataccacacagctctgccacttatctgtgtgatgctggccaagctatttaacgtctctgtgcctttatttccaatctataaattgaggatgataacagtacctaaatccatatgttttgatgaagataaaatagggtatacaagggactggaaggtttcttgggactctcaggactataactgggaaagtcacaagcaaactgatatgtgcccatcaccttaagatgaaatgagaggccgggtgtggtggctcgtgcctgtaatcccagcactttgggaggccgaggtgggcggatcacttgaggtcaagagttcgagaccagcctggccaacatagtgaaactctgtctctaccaaaaaatataaaaattagctaggcatggtggtacgtgcctgtaatcccagctactcaggaggctgaggcacaataatcactttaacctaggaggcgggagttgcagtgagccgacatggcactactgcactccagcctgggtgacagttagactccatctcaaaaaaaaaaaaaaaaagatgaaatgagagtgtatatgtacctttattttatttatctgtttttaattttaaaataattttttatttattaattaagatggggtctcactgtgttgcccaggctggtctcgaacctctaggctcaaggagtcctcccactttggcctctcaaagtgttgggattacaagcatgagccaccaagcccagcctacatgtacctttagaaacaacacctgcacattttttttttttagacggagtctcccactgtcgcccgggcatgatcttggctcactgcaacctccacctcccaggttcaaataattctcctgtctcagcctcccaagtagctgggattacaggctcctgccaccatgcccggctaattttttgtatttttggtacagacggggtttcactgtattggccaggctggtcttgaactcctgaccttgtgatctgcttgcttcagcctcccaaagtgctgggattacaggtatgagccaccacgactggccaacacctgcacattttaatgctccttcatcttttctgtttctattcgtggctgcctccagccatggttgattccttgccatttgtaactatggtcctcatttcctcaatatccactctgcaggggcccatgatatgccttttattcctatcactacactgacttgtttcccaaagttccaaatacatgtcctggccagtcacgggacagccattaagagaatttattaagtgccaggcaaagagcttttcaacaaatccttcagacttttcttcttcctcaattttcaggcgacacgtaacttaaaggttaaaatggggatgataatagtctcctccccttgcgtgaatgcccacaatggtttttgcttatctgtccactcctcctctgtctcttaatagttgaagagcctggtgtggtggctcctgcctgtaatcccagcactgtgggaggcagaggcaggtggatcgcttgaacccaggagctgaggccagcctgggcaacatagtgagactccatctctacaaaaaaataaataaaattaggtggacatggtggcacatgcctggggtcccagctactttggggggctgaggtgagaggatcgcttgggcctgggaagtcaaggctgcagtgagctgtgattgtgccactgcactcctgtctgggcaacagagtgagactgtctctaaaaaaaaaaaaaaaaaaaaaacacccaaatagttgaataatatgaattatagtgacaattttttgagagcttactatgtataatactaggcactatatcaaaccccttaaaaatatctcattggatccttatgaaaaatccaaggaataggtaccattattatccccattttacagatgaagaaactgagtcaggaaggccagctcacttcccctagtggcagaatcaggacttgaacccaagtatgactccagagtccttgctccaagcatttcactattctgtttcctcttccttctcctgcctcaactgtgctttctggacaagtttctgccttgatgacaaggctctgagcaggaagcctcacctcttcaagactcagtctgctcttcttttttttttttttttttttttgagatggagtcttgctctgttgcccaggctggagtacagtggcaccatctcgactcaccacaagctccacctcctgggttcacaccattctcctgcctcagcctcccgagtagctgggtctgcaggcgcccgccaccacgcccagctaatgttttgtatttttagtggagacggggtttcactgtgttagccaggatggtctagatctcctgacctcgtgatccgcctgccttggcctcccaaagtgctgggattgcaggcgtgagccaccgtgcccggcctgctcttcttttttttgaacaatataaacatggtgtattaacaccaaatagttgtgaggatggaacgcttgtgaaatgcatagcacagtgttcccagccactgtgatcagtattatagaagaattttgattattactccatcagtatgttcctgttgtagactgaattgtgttccccaaaaagataggttaaagtcttaatctccagtacctgggagtgagaacttattaggacatagggcctttgcagatgtaataaaactaaaatgaggtcaggcctggcatggtggcttacacctgtaattccagcactttgggaggccaaggtgggtaggtcacctgaggtcaggagttcgagaccagcctggccaacatggcgaaaccccatctctactaaaagcacaaaaatttagctgggtgtggtagcaagcacctgcagtcccagctacttaggaggctgaggcaggagaatcacttgaacccaggaggtggaggttgcagtgagccgagatcatgccactgcattccagcctgggcgacagagcaagacttcacctcaaaaaaaaaaaaaaaattaaaattaggtcattagagtagtcctaaatccaatcgctggtgcccttataaaaatagacacagaaacagacagacagacagacacacacacacagagagaacaccacgtgatgcatgtgatgatggaggcagagctcagagtgattcggctgccagtcaaggaacactagtgattgctggcagccacagaggctgggagagaggcacggaacagcctgtccctcagagcctccagaaggaaccaaccttgccaatacatagatttcagacttctggcctccagaactgtgagacagcaaaattgtgttgtgttaagccacccagcgtgtggtactttgtgaacaaatacacttcctggccaggcgcagtggctcacgtctgtaatcccagcactttgcggggccgaggcaggcagatcacttgaggtcaggagttcgagactagcctggccaacatggtgaaactctctctacgaaaaatacaaaaattagtcaggcgcggtggtgcacgcctgtaatcccagcgactcaggaggctgaggcacaagaattgcttgaacccaggaggcagaggttccagtgagctgagatcaagccactgcactccagcttgtgcgacaaagcaagactctgtctcaaaaacaaaacaaaacacacacaaaaaacaaatacagttcccttccacagcctaagtccagaccttcacattctgtgcaagttcctcttccaagggcctcttcaaatgcaggcctgcctgcagctctctttcctcaaatctgtcttaacacaccaatttctgactcccgggtcaaaaacctgcgatgacacctgaatacttacatcagtatttcctaaagttgcttgagataaggatcaccaggatgacagtccaaattacaggttccctgctaggtgtggtggctcacgtctgtaattctaacactttgggaggccaaggcaggtggattgcttgagcccacgggtttgagaccagcctaggcaagaaggtgaaaccccatctgtacaaaaaatacaaaatattagcccggtgtggaggcgcacacctgtagtcctagctactcaggaggctgaggtaggaggcttgcttgaacctgggagggcgagactgtagtgagtagtgattgtgcaactgcactccagcctgggtgacagagtgagaccttgtctcaaaaaataataataattataggtttcctgggccccgctccagactaccagacatgagatcacagaagaggcgcttggaatctgcatttttaataagcacccaagacaattcttttcctcagtcacatttgggacactctggcctacaagataaaatctggaagagactaaagatcttgcctcgatgatctctataaaatggcgccagcctccccattcaaatgtcatctcccaaggcttcccactgtctttacatccctccatgtgaacagcctgcctcactgtcctcaccttgatcaacctctgctcaaacctttgttcttgccattctcctgcccagaacacctcttccttttctcccatcatctaggtctgattcagatgccacagatcttaaaattatttctaattgttccaagatagcttctcaatgacctcagaataaaattcaatgtccttgtcatagcctgcaagaggctgcatgatctggccatggtcggtctctctctctctcttttttttttttttttgagatggagtcttgctctgtcacccaggctggagtgcagtggcacaatctcggctcactgcaacctccacctcccgggttcaagcaatcctcccacctcagcctcccaagaagctgggattacaggtgtgtgccaccgcgctcggctaatttttgtatttttagcaaagatggggtttcaccatgttggccagggtggtctcgaactcctgacctcaagtgatctgccctcctcggcctctcaaaagtgctgggattataggcgtaagccaccatgtctggcctcagtctcattttaagccattcttctccttcactccaagctccaggcctggtcgggtacagtggctcatgcctctgtctaagcaaaggcatgtacacgtgcatggatgcacacacacaagcacacacacaacacacacacacacacacttgctccactcatttcactcactgtaccctgtttgattagttgccaacatttaaaaatcaagaagtttcacataaaaacgtccagtctctaactggatgcagtggctcatacctgtaatgccagcattttgggagaccgaggagggaggatcgcttgagctcaggagttccagaccagcctgggcaacatagtgagatctcatctctacaaaaaaatataaaaaactagccagttatggtggcacacgcctgtagtcctggctgctcaggaagctgaggtgggagaattgcttgagttcagggtttcaaggctgcagtgagctatgattgcaccgctgtactccagcctgggcaatagagcaagaccctgtctctgaaaaaaacaaacaaaaaccatccagcctctcttaaagaatcagatctgcccacttcaaagccctccttcccacgcagctggagccatatggactggaggtgagtcccttctgcggggcggaagctctggtcccctgcagtccccacccagcctctccttccaccccacattggtgcacttgctgactgtctctcacccttgtaacctgggcatttagcctgtgcctggctcttagctacaccttaataaatatgtgctgaatgaatgaaaaaatacatgaatggatgccttccctcctccctaaaccccccaggccacaccacttatttggccatttaatcacagccttccttgcaagtctcactaatttgctgccccactgcctgcctcctcagtagatgttattaaaacacaaatctgattctttcattccccagttttaaatgtgtggagtctcccagcataaactctgcaccatggcctccgaggcccttctcaatctgcttcccacctacttttccagtcccaatctccagagagggcccccacccagcgcacacccacgctctacgcgctggctggggaatacaccatgttctttccctgcccccacaccactgcctgtgaagctctgtctcctggaatgcctcctcccctccgtgcctctagcaaactcctactcattcttcagccctagcactaagtcacttcacccgtgaaacactccagaccccccctgccccggggctgacttagtcattctctctctgctgctcccactcttctcctttcatcccctggccttagcactgagtaatagcttaaaatagcagctggtgctttctgagccctgttgtgtgccaggcaccaagtgagctttatctcccttaatcctcacgccccatcctgagtcccggccccctaaacctgcagaaacacaaggatcactttctcacctccaatgtcccagagaagccatcttgctaccctattttaaattttctttctccctccactcctcactccaccacctcaggcctcccatcccacttcccagctttattttcctccatggctcttatcacttacacactatatacttaaattcatttatttgcaaatgtcagctccaggattttgtctttttttaacactacaatttccttaacatctggaatactacatggggccgggtgcagtggctcgtgcctgtaatcccaacactttgggaagccaaggtgggaggactgcttgagtccaggagttcgagaacagtctgggcaacatagtgagaccctgtctttttttgttttgttgtgttttgttttgttttttgagacggagtcttgctctgtccccccggctggagtgcagtggcgccatctcggctcaccgcaagctccgcctcccgggttcacgccattcagtgagaccctgtctttacaaaaatttaaaaattagccaggagcagtggtgcgaacctgtagtcccagctacttgggaagctggaacgtttgctggaggtaggaggatcacttgagcccgggaggcagaggttgcagtgagctgtgatcatgccacggcactctaacctggacaacagaatgaggctctgtctcaaaaaaaaaagaaaaaaaaatagactagtacctggcacataatagatactcaatcagtaataattttttttttttttagatggagtttcactcttgttgcccaggctggagtgcaatggtatgatctcagctcactgaaacctctgcctcccgggttcaagcaattctcctgcctcagccctccgagtagctgggattacaggcatgcaacaccacacccggctaattttgtattttttagtggagacggggtttctccatgttggtcaggctggtctcgaacccccgacctaaggtgatccacccgcctcggcctcccaaagtgctgggattacaggcgtgagccactgctccaagccttataataataatttgttttaaaaaaagaatagagacagagtctcactatgttgcccaggctggtctcgaactactgagctgaagcaatcctcatgcctcggcctcccaaagagctaggaaacaggcatgaatcatcacgcccagcctcaatcaataataattaaatcaaagaaggtagatactattactaccttcattttacctgaggaaacaaagattgagagacaagtgtccagggttccacagcggggtggtggcagaaccgcatgtgacccctgaatggtcaagtctagtgcccgcctccttagctgctgtgcccaccatctccaggggagtttatggttccctctccatgagtctgacttctcagctcgaccctgagttccttggaggcaagcactctgtcgcgttcatgtctgtttctttgtctgatccatggtaggtgctccaggaacgtttgttggagcagtctgtccatggaaggtgcagtgctcaacggcaggaatcaatcacagtgtcattctttcgttgttgttttcctttatctccatgcacaatgttatacatacagttggggctcattacatacatgctacattaatgaattatattatgacagtaggtaataaaaataattagacagcaataatgacaataatatgtaacacttagggcatccttactctccgttgggcactatcctaagtgctttgtatatgaattaaaacaattcattgtcttattatgctcattttacggatgagaagacagaggctcaaagaagttaagaacttgcctaaggtcacatagttagaaaatggcagaggcaggactcaactgtatgtatctggcttgagtcatgctcttaatgattgctcttggcctctctgagggatgtctactgagaggttacccggtgtgaaaacaaaaagaagcatttatttattacacatttccattttatttcaaggaactcctttcaaaggctttggtaggcaacattatttgctaaatgaaacccagtaatatctgtaccagacttgatggtttgcagagcagtttcatgtatggttcctcatctgagccctgcaacaatctggtgaggtaggcattgctgtctacttctgtttatagaggaacagaggagaaatctgaggctctgagtggttaagtgaacagggtcaaggtcacccagacagcaaggagcagagcaacgactcaaataaatgtctatcagtttaaaaaacaaagatctgatgcctccaaatatgaagttatttcatgcaacttaaaatcaaataagtaaatagcagcttagccagtttctggcacctggtaggtctcataaatgttaactatcaactatcttcatcaacacctcctgggaagtggaatagtttggctgatgactgcagcctgtctgttgaccctgatggaaagattattattttcattccagttcatccctggtaatgttgaaataatgatcaatctccattatccctggagtaccatagaatgttatgagctggaaggggttgtggagatgatctcatcaggtcctgcatttacagatggagaaattgagtccgagagaggggtcagaaagcaaacccgtggcagaccaagccaagggcaaggcttaggcaccgtgcctggcacatactgcctcctgcaaagctgagtttttacctaaaagggctctcacgtcctaaaggctacagaaaacaattcattcgtctctctgtctgtgagcaccaccaccccagctccgcgcaaaaagcagtacagtattataagctattaaccagaaaacagatcatgtgacttaattccacctctgctaaagggcttaaaatgcttcagtgagtagtctgatattcgtaaatatacacttcaactatttctcaaagaatgattaaccagctccatcagaattggaacttgtgcaatcaaggagaaaaagagctggcaagagaaatttattgaaaaaatttttaccagcattacagatgacttcttgccaccttttttttttttcctaagagttagaggaagaaggaaaggaagaagaatcattacacaataatgaattaagaaaactaattgtggaaaattacaaactcctttcacctcacaaggtagctttcaaacaaacacaacagggtatttgtagaacctaaagacacagacagtattgaaaaggagcagaaagcaggagtgtaaccttcactaacttctttcagagagtggagaggcctgacagtgtatgggcgtgattatctctggtagcccattctggactaacgattctgtgaacctataatttagagagtccataatgtcatatgttcaccttacttatctccctaacccactgagtattaattctcccaggcaggggactagctttttaggccacttgtaagtcttgatcagctttagcttgaggatttgggggtggggagggatgatggacagaaataaggttagggttagccttcaaatggaagaaacgggaatataaaatcctcgtctgtgctgatcatgcttctcaagaaaggctgaaattcaggcccagtgaacacacttgtggccttaacatctctcagaatgaaaggattttcttccttcacaatacctttatcaaattccaactattttctacttttcttccttatacaacccaggcgcacgggttgaaataattttccttaagaaatccaggaagctctggcctggccctccctctagaaaggaaagtccaagtaaagagggatgccacacctggggaagggagagaggatgtgacgacacctccaggaatgcagggcccacgcaggtgcactggcacccacgaacttcctgataaatcagtaccgataacaggagtaaaactcaaccacccaacactcactcacacagagctggggtgctgctcccagggtgtggccttgccaatcagggagaggaggaggagacctaagaacggagctctctaaaggtggtgacatggtatctagtccagccatgatcagagtgtggtctctgggagtccctgagacccctttacgggggtctctgcaaggccaaaactgctttcacaaaactaagatgtcatttgttctcatcattcccattgtctcacgagtatacaatggagttttccagaagggacaagacatgtgatgacatcatcactctgatgactgttggaatgcatgcttgtgtactcccatgttttggacacatccgttttaattctaagataaatattgaaagacattacacataaacaaagtactttggggtcctccatgatttttaatagtgtaaaggggtcttgaaaacaaaaaggttgggaactgctgtgctagtccaaacaggggagttacaggccctgacatgcactttatttccggctgaacttgagtcacctcctatgtgctttcaaacagggggtggaggcagcttgcttatttattatacagcttggattggtgtcctttccacctgtgctgccacaggtggccagaaaaaccttaaatcctcccacaaaacgtctggttacctgaatcctccagagggaaaaaaatgagcttctcgcctttgaacccaagtggggcaaagagcctgcagaagggacaccctcagtggcagcacccagcaaagacccatctgagtacccgctgggagtcgggttctgtgccactcaatgccagcaaagcacaagccgtccctgcgccttcgggagctttcattctaggctggtggcagattactcacaaaactcagatgcacacaaaaatgggaaacctgtaacttgtaacaagtgctgggcaacaggggtacaagtgttaggaggcctccgaggtgggcagggagatgaggggaggaaggtaccctaaccactcttcttgccaaatctcaggttggaccttcccctccacctccattcccctgcccccttcctggcttgcaggtttcaacagctcttggattcccgggtcccacagggagaccttgggacctgggaatctcctccagccaaaagcttcagtcttctcctctcctccccatgacccacagggtctgtgtgaagagaggccgggctctgggacgttcagagaggaggattcagcgttttgttgctctgggacacagcttggtcactccgggaaacgaacacaacctagaggctgtcatttgtagaaacagcgaatggccaaggaatggcgggaggagggaaaaggaagacttttaaagaaaaaaaaaaaaagccctgaaagactggactagaaatcctcagggaggctgggcctgcaaggagccttcccgcgcctcagcccactttccttccctctcgacctgacggacttaaggcgtgcagagtctcttcggacaaaatgaagccaagagagccctaagcttctcccccagcaaccgctgcagaggcgggaaaacttgaattttgcaaccaagagttgcagcgggacgcctaagcaacgataaggggcggtggaggggcgtcgttgggggctgcagcatcccaaagtggaagcgggaagggggcccggctggaaccgaatagccccgcagcgcctcggcaaccggacgggcggcgcatccaatcccctggaccgtgcgtgtgactggcgcgcgctaagcggcgcgagccccggcggagccgggcaaccaggcgcgcgctcgcgcgtgcgcaaaaggcccacccagccgagcccttcttcaggtgcgctcgcgcttccggccggcctccccgcgtgccttcccggggcggaaactccagcacccgcgcatgcgccttctggctctccggcctgaagcggggcggagggccatggcttcaggtgatcccgcccctccctcgtagcgcaggaccaatcgtgcggtggtaggcggggttttgaggaggcagcccgcccacgcaccgcgcgaggcgtgtatcgattggttggcgccgcgggcgcaggtgcgcgctttctattgggtgtgggcggaacgcgagggattgcggcatcttcgggggctgcaggtgagcgcgcgcacgcgccgcggctgtggtccgctcgggtgcgcgcgcgcgggctcgcgggggaggcggcagagggagaggttgcggcgcttgtggcctccgctccgccccctcctctcctccagcgctgtcgccgtcgccgccggggcccggagggagggagctgcttccccgcctgccgcgccaccagtccgaccctcggtcccgccgtgtgagcagctggtggagtggagctcagcgcggacgccggagctgcggccgccccctctgcaggtgcctgtgaggaggcgcccgggccgcaaccgctttccgagatccccagtcgcgcactcgctccccgcgctcctgaggggccgcccggccggaggaggccgtcgcggggctcggcgttcagcatgaaccgcagccaccggcacggggcgggcagcggctgcctgggcactatggaggtgaagagcaaggtgcgcggggcccgggctgggcggagcggcgggcctggggggccggggcctgggagaggccgggccaggctcggagcgccgggggaggcgacgggctgagctgccccggggtctggacggtgcggtcgggagactgtgggtaataaacttgccgaggagggggtggcgggggtcagggggcgctagtgtccgcccctggcccgggcaggaagaagacctagtccagcatttaatctcattccgtaaatctcattcccgtgttcacggacgggagtaggggccaaggtatatccaaggatggcgcacactgagtgaaatgcgaggctgctcaaaaggtgtaggagaatcctgcctgctgggctgtgagtaaagggccctggaccaccccgttgttcccactttctgtggttaaggggcgcatcgagtggcgaaggagagagcccagtgaactaaacagccctttaaaagttcgctttgcttcctgctggcgctctttctagcactaactttggtatgcatttaatctgtaaaattagtactatcaccttacgttggagtagcactttacagtttgactctagatgctcttttcattccatcctgctacctactcacatcaagtgcttttccccttgaccaacggtatgccaatctgctgataattacttcggtattcactgaatttctaaatctcaaggctcagtgagcagggtagtctgtagggagggattagttagggaatgccttccaaagggggttttgagctggaatttgaaggtgatcggcagccaagggaacactttcagcaagcgtttcttgagttgaagagttaaaaggagcttagataatctagcccaattctctgagaagactgaggcttagaaaggttatgacttcctcaagctgtttttttgcaaagccttcatgcctttttaataacttctagacattgcagaatacaaaacaggacactggctgggccctgagaacatttaaaatagaattgagaaggccaaaacacagaaaaggagaaaattgaaagtatatcaatttcaaaaaaaaaaagtaatggagcatcatagatggtaagactactaaggagtatgtaaaatcaaggagtgatttgagtgaggtacagtggagtaaggaaagcttcctagagcctctaggtagaatagttttattgtctagggttgataagcaaagttctgtaagtttctgtaactgagaatcacatcgagaaaatcgacattcgtttgtaacatcattaaaaaatgtgatttgagtctgggcgcggtggctcacgcctgtaaccccagcactttgggaggccgaggcgggtggatcacctgaggtcaggagtgccagaccagcctggccaacatgatgaaaccccatctctactaaaaatacaaaaaatttttagccggccgtggtggcacatgcctgtaatcccagctacttgagaggctgaggcaggagaatcgcttgaatccgggaggtggaggttgcagtgagccaagtttgcaccattgcactccagcctgggcaacaagagcaaaactccatctcaaaaaacaaaacaaaacaaaaacaaaaacggcttggcacttacatgaggattggcactagtttcagaattagtaagaaaagacgtgtagttacagcaatttaaggaatgtgcatgtccatgtgtcctctgtgcacagcatagcaaattgaagtgacttgcttgagctatagcgttaagatgacccaaaatacatagcagaacttttcctttagcggtatggtggcagtagaggttccatgcccagtggttgaaccttcttatggcatttttgttataagtttagtttggatttgtgggagttgaggttatggaaagaaaaacacttgtgatattgcataatcttaaaattttaagtttatagccctaatcttggtagcaagtctttaatttttttccacagaaaaaaatgagtaggaattctaagtatactgataaatacaatcaaatagtaatttatctctagtactaagaaaccttgagtgctttaaaactggaatttcaggctttttgcctttctcttgtcaactgatttgtgaatctttcacttacttctgtctaaactacatgttgtatatttgaactgccatactgcactttcagctaactgtgtcttttaaatagaatcatacactgattctaggaacatgtgctgaatgaagtcggtcccactattctagctgttgacaaataggcaagatataggtagtgagtgtttctagtatgtctatgacaccttatatgtttcaaatatatattgctgatacatttattttcagtagattgaaacatttgtcaccttaaccatttaaaaaatatttggaagggtttttgaaacagtattttctttgacattgctttagtgataccacagctttttacaaaactgattgctaagagtttataaccaaaactaggtagtgtgccggtccttttttttttgagacaggatcttgctctgtcacccgggctggagtacaatggcacgatcacggctcactgcagcctcaacctcctgagctcaagcgattctccgatttcagcctcctgagtagcaagactacaggcgtgcaccactacacccagcttatttatttatttatttatttatttattttgtagagatggggtctctccatgttgcccagtctgatcttgaacacctgagctctagtgatccgcccgtctctacctctcaaagtactgggactacaggcgtgagccactgcacctagctggtccatttttctcttactattttcaatttttttttatctttttagagacagggttttgccatgttggtcatgttggtctctaactcctgagctcaagtgatattcccacctaggcctcccaaagtgtttggattataggcattagccaccacactgggttccggtccatttttaggatctctttttcttcatataaacagtaatgttggccaggcatggtggctcacacctgtaatcctagcactttgggagggcaaggtgggcggatcacctgaggtcaggagttcaagaccagcctggccaacacggtgaaaccctgtatctactaaaaatataaaaattagtggggcgtgatggcatatgcctgtaatcccagctactccggaggctgatgcaggagaattgcttgaacctgggaggcggaggttgcagtgagccgagattgcgccactgcacttcagagcctgggtgacagagggagactctgtctcaaaaaaataaaaaaatgcaataaagcagtagtgtcaacattattatcttcacacgtggaagggaaaaatagtaatgataaaagaatggagaatgtaaatatacctatagttcaatttgtggtaccagctagtatgtgacttttctttggtaactgttttatcttcctaattgtatctctagtgttgggaagattcttaatcaataatcttgatgatgtcctttaataaccctggaacagtctttgagtcataaaatttcctaattattattcataggcaaatagactatgaaaattaagtttgcatttctagaatgtaccaacagacactgggggaagggagtccatacacattctggatggctagggcaaactaggctatgaaacagttgtaaatggttcacaagtgaataattgctgattgaatcttaattttgtctcttagtgtttttgttcatgtaaaaagttcccttaatcctattgttgtgttgcaagaagcataacaatttctcttgggtttttttttcccatgccaatattggcaaaagtgcaaatataccatgaagccatacaattttttattgtttttatcataacagttaagcaagagaaaatattgagcgaagaaatttcatccaaaagctttaacaaaaacattgaagccctaaaatgttaaatgatcagatgttattcccattcatacatcaggggaagtgataaaccctgtggatgaatcagcaagcactagcaacttcatgttgtgataccagaataaagaaaatggaggagaaactgtgacttttgataacatcatgagactaactgatatgaagggtgttccctgagtttttatttactttgaaatgtgaaggtgtgactaaactttttgagagccttaggtatgagtcaccttattttcttgacagatgttagtgtttatgtttcaggaatgtgttttgggaactattttaatttttgttagaggtaagaggtgtttttagtgagttttgatgttaaaaccactgaggagtatgggtgtaagcagagcaggtgaactttagatagagcaaaaccagtgaatccagatgtcccatgggacctttgggaaaatgaagtgacatatttgtaaactcaaattattatggtaggggctttctctacatgatgcttaaggctgtaccaacagtatttctcttttccttttttctctgggacataatatttttacattagtatttcttgctagtaatagataggtggaagaaatatgagttcagtggttaaacacattaggcaaacgttcgtttaaatatttttaaaaaccaacatagggcttaaatgagcctttaaagtgctggtctccgcagtgattcccaagagcataattatgtagcgtttctcaaacttacatgactgggacactttttgaggaaggcagattaacttttcttaggtttccacgtttgaggaaatgccatgttattcccacagtgttataaatcctgtttatcatggactagatgaagccagtccttagtgttttggttttttttttttttttcttttttgagacggagtcttgctctgttgcccaggctggagtacagtggcatgatctcgactcactgcaacctctgcctcccagattcaagagagtctcctgcctcagcctcctgagtagttgggactacaggcatgtgccaccacacctggctaatttttgtatttttagtagagacgggttttgccatgttggctaggctggttttgaactcctgaccttgtgatcctcccgcctcagcctctcaaagtgctgggattacagatgtgagccatcgcgcctggcctcagttcttagtgttgaataagagtcacttttaattatttgacattgggaaaacagaggtgtagggaaacagacttcagaatcagaactgtgaaggtaagtattgggcatgatggaggctgtcttcctccccattccgccccatttgtgtgatctcttaatacctccctgaagtaattattctctttacccactaattggtgagcttctggagcaggctcgaggctttcaatctctagggcctagcactgtgccaaacacataaacactttgtgcgttaattggatagttataggacatacatttgatgtattactgaagcttatttttttctgcattaacatagggaagatcataccttaacgccacgtagctcacagttctttttgtatattttgctgttgattcttaccacataccatgaaatcctagttccatttatgggggaggacacttaaatgctttcctttggtcaaaataaggacttggacaagtctttggtaccccatgatgcacctgaggagagcattgccgtcagagtctgggctccagacagggtttgagctgagtcactatgcagaacagtccgcagtaaggcctaggtaccccagggatagatagagttgagcctgcctctcttgaaaggaatgctcttcagagacacagcagtcaggaggcacattcttgtgcctttcttaggctttttaaaatccctgatagtaaggttcttcacaatagacaatctttccttaattaaaaatacttgctctgctcgttaatttttctatggcatgcattttcaaattgggtccttttacttttttttttttttttaagtaatatgtttgttacgtttatagtttggagctgaatttcgtcggttttcgctggaaagatcaaaacctggaaaatttgaggagttttatggattactacaacatgttcataagatccccaatgttgacgttttggtaggctatgcagacatccatggagacttactacctataaataatgatgataattatcacaaagctgtttcaacggccaatccactgcttaggatatttatacaaaagaagggtaagtatcactgtttagaaaaattgtgttagaaatagaaatagtgtattttccccactgaaaggatacccagactttgccacaaacttagtgaataaacattttgtgtgaatcttcttatgttaactaacatgtgggttaaaacatttgtgatattgttggtttaattaatatctttatgcttcactaagtgtactttagaaaatttatatttctagttacttttgtgttaacctctttggttttatttttccttaagtagaaattgggaatttattgaatattgggaatttattgaatcttcactttatcaaatggattattctccactcagaaaaatgtgaaaagagtgtgactttggaatccaaagcattcctgttttttggtggcaaccaactttcaaaggctgtatttaccagttaataaataccagaaacaaagccatttaatcttcctgagtctcaatgtctgcacctatagaaagattataatattttgtagaattactatgaggattaaatgagctaagtgcagtgccctggcttatagtaagcacccagtaaatactttctttcttttacttttaggatactttttaaagaaattgtataaaactagttaattatctggaaaatgaggtgggaagttactattgtggaaggatgtaaacactgatattaattagtcttccaaaaaaattgaaatcactatttggcaataactttctttctttctttttttgtaaagactgggtcttactatgttgcctggtctccggtgatcctccagtccctgcctctcaaagtgctgggattataggcatgagccaccatgctcagccaagaattttcaaatgtattttgagtcctaaaactttttttttttaatctcgtagcctttgtgtgtgtatgtatgtgtgtctgcagataggcagggtagggcttattatggtatgtaccattttttcctttctcaattgtaaatgaagtggtttgggaagccagcatgagagcatcaagcctggtattgggataaattaaagacttacggtatttataagccaacccagaaagtagcttgagagcggccaggcttggtggctcacgtgtgtaatcccagcactttgggaggtggaggcgggcggatcatctgaggtcagaagttcatgactagcatggctaacatggtgaaaccccatctctactaaaaatacaaaaattagctgggcatggtggcacatgtctgtaatcccagctattcaggaggctgaggcaggagaatcagccaggaggtggaggttgcagtgagccgagatcgtaccactgcactccagcctgggcaacagagcaagactcctcaaaaaaatttttttgaaaagaaagtagcttgagagaatgggtggggattatctttgaaggtgaaaactatttctaatcagttgataagcattagaccactcccagggctctggaattccactgattatgtatctttgctttcctgggtttggaggaactaaagtccaccaacaaaataaacctccaaggataacctctgcctatatcacttgactattttacaaaatactttcacacacaaattaatgttcccaaagtttcctgagatggatctcaaaggtaattaacaggaatgcgatataatgagagtatgaccttaggaagattcagttggctgttcaggatgaattggagtgggcagcagtcttacagtagagagccaggagcaggcggtaaagaagtgaggagactggcctagaagtagaggggaagggtggggggaggggagaaggcagtggcgggaaggtaggaggggaaatacttgggagtcattgcactcactgtggctgctttgcagtgaaggagagtccagcagagcatatcttgatggtttgagtctgacagctgggacagtgtcatgaacaagcagagtagattgatttggaaaagaaaattatgaattttgtcttaggacaaataatcttaaccagtcattcagaagattagaaatggtagacaaaagttcagggtagaaatccaaaaactagttagatttgcaagctttttgaaaagtgatagttaaaattttgggagtagacataaaggctatctgagatgaagaccatggatagaaccttggaaagctatatatagagtgctggaaaaggaggaagaatttaaataattatggttgaataataggcctttcttgttagcaattgtaattttctttaaaaagttagttgctgtttggatgtgcattcaaatatagagtgggtttttaaagtattgccatgtgacagaattttgttggattatcccctttggtagaaagattatgacagttgagttataccaccacatgttttgttaatggaattatactcttgcatgattatggaattaatcctaacatcttttaagggtagttatcttttatttcctttctaagtttttatttattggtggtataatttttattgagacctttgatggtttttattgttgtcataggaattacaacttagaaatatgtttctatgtgcaaatgttttctatttattaatggtaaaatgtccaatataattgatagcccttagaatttgatttagaaataggcaattcaacagaaatattttagattttaaaaatataaatttaatacaaatatgactttagcaaaaatgaaagtaggtagtcagttcattcctgcttaaaaccctctgatgatttcccattgcaaccagaataaaatcccttctgatttggacttcccaacctcatcttccctcattctctcactccctcatcacagtcagccacactggcttccttcctgttcctcagacttgatgagcttgtttctttttttttttttttttgagatggagtcttgctctgtcacccaggctggagtgcagtggtgcaatctcggctcactgcaacctctgcttcccaggttcaagtgattgtcctgcctcagcctcctgagtagctgagactacaggtgcatgccaccatgcctggctaatttttgtatttttagtagagatggggtgtcaccatgttggccaggctggtctcgaactcctgacctcaggtgatccacccgtcttggcctcgaagtgttctgggattacaggtgtgagccactgcacccagccgttagcttgtttctgtttctgtgctcttatgcttggttattcttaaggacacttcaccctcggttcttcccacgtctgcctcctcctgcttagctcagataagtttgtcagaggagtctcttctgactaccctaactaaagccctccaccttcccacctttaccacatcatcctctgaagacctggaaatatcttatttaagaatatgttaacttgtttcctgtctgtctggtttaccatcaggtcgcagcatctaaatctggcagacttacttagtgtactataatgcatgcactcttttttttgtggagtggggacggagtctagctctgtcccccaggctggagtgcagtggcgcgatctcggctcactgcaagctccacaccattctcctgcctcagcctctgagtagctgggactacaggagcccgccaacacacccggctaatttttttttttgtattgttagtagagacgggatttcactgtgttagccaggatggtctcgatctcctgacttcgtgatccgcccgtctcggcctcccaaagtgctgggattacaggcgtgagccaccgcgcccggccgcactctgtcttttaagcaaagttgagcagatgcttaactagaaatctgattttatgtaaaccttaatgaacatttaattcaaggaactaatataaagtatgacattaagtatagttacattttactgcttgattacagcacattttctgtttgctttttgatttcagttaggcatcagtaaggcagaagttacacttaatatgtactggtgttttgttttgttttgttttaagtcttgctctgtcacccaggctggaatgcaggggcgtgacctccactcactgcaacctccgcctcccaggttcttgtgcctcagcttccagagtggctgggactacagatgcgtgccaccacgcccagctaatttttgtatttttagtagagacagggttttgccatgttggccagactgttctcaaactcctgacctcaagtgatccgcccacctcggcctcccaaagtgctgggtttacaggtgggagccgccgtgcctggccccaagtgatttattttattttattttattttattttttttgagacagagtcttactctgttgcccaggctagagtgcagtggtgtgatctcggctcactgcagcctctacctcctgggctcaagcgattctcctgcctcagtctcccaagtagctgggactacaagcgtgtgctaccatgcccggctaatttttgtgttttcagtagagacacggtttcacgacgttagccaggctggtctcaaactcctgacctcaggtgatccaccctcctcagcctctcatagtgctgggattacaggtgtgagccactgcgcctggcccccaagtgatttttgaaaagcaaattgcaaaaccattttaaaatttaaaactatgtgatcttttaacatctgatactctactaaaatttctttaaagtgaaagcttacaattcaatgtgtaaactactttatagtctgaagtttaagatagtgttgttggatatcttgaaaaatttttataacaatttattgttagaagaaaaaccccatactctattcctagagcagttatcatgggagcaaaaacaaagcacaagaaacctggtatcttaaaagttattttcatgcagaggatcccaatcccccattccctgttaagagtattagagtttatcctaattgattcgggagatggggaagagaaggtacagaatagactttctgctctcattgttgaggttattgctgtgcactaaaaatttttaaaaaaatatttaaagcttgcgccttttaaaaatactcaggtcattcctgtcagtttggaattcagccagggaaatgtgtatttttaaaagcttcccagccagtcctgataatcagccaggtggaggatctgttgatgtgctacagaacagacccctctccagatctagtcagaatctctacatccagacttcttgctataacaccgtctgtttttgattgacaccagacacatatgtttacctcttcgatttattctcgttttattaggaacactagaaaggctttgctttaaactttgtctctcatagggcatgcccttacacagatgtgactttgtggcccagatgctggtaactgggcatctaaatcatctcttagattttgtgcattggacattattttgtaggtgtcttttaaggttacatttttatgaatcagggtttaaagttgtctaaggaatatacattttagtagtaaattgtaaattatagttttaacaaaagatatggcccagaaatgaaaaaaataaattacagcctgtaatcccagcatttttggtggccgaggcgggcgaatcacaagatcaggagatcgagaccatcctggctagcatggtgaaaccgtgtctctactaaaaatacaaaaaaattagccgggcttggtggtgggcgcctgtagtcccagctactcggaaggctgaggcaggagaatggcatgaacccaggaggcggagcttgcagtgagcctagatcgcgccactgcactccagcctgggcgacagagcgagactccgtctcaaaaaaaaaaaaaaaaagaaattgtggagtaacatctcagtatgtgacaccagttactcacaacagaaacgtgggtgtcacctttgacacatacctattttttagtcagtcaccaagcctattaaaactgtgttctagttatttttcagatttgtctccccatttccatgtcctctgctccaggccaggtgccatccaaatttactgaagtagcttcttttttttttttttttttttttttctgagaagcagtctcgctcttgttgcccaggctggagtgcaatggcgtgatctcgtctcacggcaacctccgcctcctgggttcaagtgagtctcctgcctcatcctcccgagtaggtgggattacaggcatgcgccaccatgcctggctaattgtgtatttttagtagagatggggtttctccatgttggtcaggctgcttgcgaactcccgacctctggtaatccgcccacctcggcctgccaaagtgctgggattacaagtgtgacccactgcactgcgctggctgcagtagcttcttgtcctccccctccacgtccttctccagcctgcagccggagtgagctttgtagaaaaaccaaatgagttcactatcactgtcttcccttaaaatccttgattttcttccctttgcccttaggctaaagtctgtaaactttggtacttcccaggaggccctgtttgtctgtttggcccctggctgcctctgactcagctcctgactccctccctccctccctccctcctgcttttcaccctctgttctagctgtattggatttctttgtctggccctccctcttctggatattgtcgagtcctgtgcctggaacattcttcttgccttctactattagcccctggctggttttcctcacagaatcacttccctggagaagccttgccttactcctacaagccaggccaggtcccctttacatacttccccagcatggtgtgcttatagctctcagcacctttgttataatttacttagagtatttgaaattatttgttagttgccatctcctcttttagattgtaagcaccacgaaagtagacaccatacctattttattcaccaaatctgtaccacagagcacaattcctggcacatagtcagtgttcgttaaatatttggtgattaatttttctgtattaggaatgaaggggtctgcaaaatttgaatatctaatttgctttaagtgatatttaatctttttaaagttgccagatctggctgggcgcagtggctcacgcctgtaatcccagcactttgggaggccaaggtgggcggatcgcccaacgtcaggagttcgccaccagcctgaccaacatggtgaaaccctgtctctaatacaaaaattagccgggcatggtggtgcatgcttgtaatcccagctactcgggaggctgaggaaggagaatcgcttgaacccaggaggtggaggttgcagtgagccgagatcgtgtcattgcactctagagcgaaactccgtctcaaaaaaaaaaaaaaaagttgccagatctatctcatttaaccattttatattagagcaagagttggcaaactaaggcctgttggctgcttttgcatataaaattttcttggaacagggtctcaccattgcccagattggagtgcagtggtgccatcttagcgtacttcagcttcgacctctcaggctcaagtgatcctcccacttcagcctcccaagtagcttggactacaggcacaaacaaaccaccatgcccagctaatttttaaaattatttttgtagagacagggtcctgctatgttacccaggctggtcttaaactactaagctgaagcagtcctctcacctcgcccttccaaagtgctgggattacaggcatgagccatcatgcctggccacataatattttatggattgtctgtggctgcttttacaagagtgattatatagcctgtaatacctagacatttactgtctgactcttgacagaaaacggttgtcaacccctggattagaacattttaaaacattatttcattatttgatttcttcctctgatcttcaagtggggcataatcttgaactttgttgatggctgtactataatggttgctgttttgttactgtatggggatactgatggagcttatgtagaagtttttttttttttctagatttgctttttactcactgtgaagcttttatgtcttacatctgcctgccacccacaaatggatccttaccctttgctctgaatgtgtggtttatgaccctctatgagcaaaggaatgagattactaggcttttcagaattaatgtttaaagagtaagaggttcagagggaagccctgcaggataagtgaagaacagccactatttgtgtgtaagaaagtaagacatccagtttgactatttggaggccttctaggtggatccttgtctgttcagttagccgagatcattggctgaagaaaaggcttgggataaatgcggtgctgctgtatcagcccatatcatgtactgttgcataagtgaatttatacaagtggacagttgctatgatcaagttttcaaactttccatctcattctgagtttaatgctctgatagtgttcaggtagaaagtcaactccaattccttgtggacattcacctttacactttaacaccctgaaccctggctttctgccaaaatattttctttcccagtggctggaaactgattagctagatgggagaacaaaggtggctttgtactggggcatattgcttttgagaatttagcagagagcattcaaatggagtctggatgtgatgccaaattatgcagatttggagtttattttggttaggtttcccatgagtaggtatgtaggcaacgtaatactgttctcagtttatatggtctggaatttcccttataaatgttatataggctttccttattgattgttttaaaacacaaatatgtatgattttgagaaaacacattaccagaagactattcttgataggtttttttgccaaaaagattgttgtaccaatggatttatatccaaagccatattataaatacatttctgtctctgtaagagcccaatgcaaatacttataaatgattacaagtgtccccaaggggaaaaaaatgccaaaaaaataagatacccgtaaccttatatatttatctgaaactaggttttgaagagtgttcacgcagcatcagaaaagaatactaaagctccccatactctgacataattgatacttggcattcattattgtgacttggaagatactagcctcgtaagaaaacctgggctctagttctttctgtgtaacttacgttgtacccttaatttattggttataaagtgaagatgataatagtttagcaatgagggggtttaggattaaacaagagaatatgagttgaagcgctatacaaacgcaagatggtgagattggtgttttctgtggcagcagctgagactaggattttcaactattttgtggaggaggagggaagccatttattttttgttgttgtcttttcttttctttttctttttttctttctttctttttttttttttttttttttttgcctagccactggaaaaccagggagaggcattattgaagttgttgtgttttttttttaattcatgtaaatttcactttttagtttatcctcattgtagttatttttgaaaatactattttaacttttgtttctgctgttagtttcattttctgttttacctctcattctctgatgaaatgttttgtttatagactatcttccttcagccatataatttaaccatatctggtgttaggtgttctgttttcccttttagtttattatttaattaggcggcagtatttaaagatcgcaagattttgcctaaaaacaagactttctggcatgaagaaaatctgcgaggaactgagaagcagctatgccatctaaatgaggcaggagctctccagtttgccagagtcctactacttcctattgtctgtgtcaccaccactgaggacaaaataccattgaactttatgcatagtttttcacacagtaaagaaaaaagttaaaactccacctttgcctctttcaaaatgaaaatgagagatcaagaattcctgctgggcgaggtggctcacacctgtaatcccagcactttgggaagctgaggcaggtggatcacctgaggtcaagagttccatcaagaccagcctggccaacatagtgaaaccgcatctctactgaaaatacaaaaattatctgggcatagtggcgcatgcctgtaatcccaagccacttgggaggctaaggcaggagaatcgcttgaacctgggaggcgggggtggcagtgagctgagatcatgcctctgcactccagccaggacgacagagcgagactccgtctcaaacaatagcaacagaaaactgagggagagtgtttatttgcagaataccaaaattccgaagtgtttgtttgatatgcatcagcatcaattacattatctgcccactcagcctctgatattggtatatgattttactctctgatttaccttgagaatcaaatatcccacttcaagtatttgagttgaatatgataaacatgcaaattgcaggcgtgtttttgttttgttaccgaggctggagtgcagtgatcatagtgcgctgcagacctgaatcctggagtgaagccatcctcccatctcagcctcccaagtagccgggactccaggcagacgctacctaccacacctggctaatttttttttacttttcataaagacagggtctcacgctgttgcccaggctgggctcaagtgatccactcaccatggcctcccaaaaaagcactgggattatagacgtgaggcaccacgcccaaccacattacaagttttttaaacaagtgaaggaaaaatgtattttaagtaactggtttaaaatgatgttttaaggccggacacagtagctctcacctgtactcctagcacattgagaggctgaggcgggaggatctcctgaggccaggagttcaaaaccagcctgggcaacatagcaagaccctattcaaaaaaaagtaaaaatacatatatatttaatgatgtttaagaatatgtaagatctggccaggtgcggtggctcacgcctataattccagcactttgggaggccgaggtgggtggatcatgaggtcaggaaatcgagaccatcctggctaacacggtgaaaccccatctgtactaaaaatacaaaaagttagccaggcctggtggcacacacctgtagtcccagctactcgggagggtgaggcaggagaattgcttgaacccgggaggcggaggttgcagtgagccgaggtcacgccactgcactccagcctggtcgacagagcgagactccatctcaaaaaaaaaaaaaatatgtaagatctatcatagtttcatttgccatatttaatgtttaaaagtgaatgagctctatcaaatttaacttcaacattggtttattttgtgatgtgtatttgagatggccacctagtggttttttctggtatggcattttactactgtactagattatgatctgattagaataagcttattagctagtttgtttatataccaaatatattttgagttatcctttctgtacagattcagctgcaagtgaatagatatttttacagcatttctataattattttgttttatttttaaacagaagaagcagactacagtgcctttggtacagacacgctaataaagaagaagaatgttttaaccaacgtattgcgtcctgacaaccatagaaaaaagccacatatagtcattagtatgccccaagactttagacctgtgtcttctattatagacgtggatattctcccagaaacgcatcgtagggtacgtctttacaaatacggcacggagaaacccctaggattctacatccgggatggctccagtgtcagggtaacaccacatggcttagaaaaggttccagggatctttatatccaggcttgtcccaggaggtctggctcaaagtacaggactattagctgttaatgatgaagttttagaagttaatggcatagaagtttcagggaagagccttgatcaagtaacagacatgatgattgcaaatagccgtaacctcatcataacagtgagaccggcaaaccagaggaataatgttgtgaggaacagtcggacttctggcagttccggtcagtctactgataacagccttcttggctacccacagcagattgaaccaagctttgagccagaggatgaagacagcgaagaagatgacattatcattgaagacaatggagtgccacagcagattccaaaagctgttcctaatactgagagcctggagtcattaacacagatagagctaagctttgagtctggacagaatggctttattccctctaatgaagtgagcttagcagccatagcaagcagctcaaacacggaatttgaaacacatgctccagatcaaaaactcttagaagaagatggaacaatcataacattatgaaaccgtggtttgaatgttttcagagtgaggatgccatgaggacttgtacatttggctagtttaaaagcatatatacctctgaccagtgacgtggaataggcatgagacgagtaacgttgcaagcttacaatattattaaagtagtagtttgataattgttaatataaactttggtggatcagaggtgaatttaagtccaaaacaaaggggcctttgctgatgaagttacgtgcttttgctgttttgtctgtggagaatcagatgttaaagcacattcttggaactatgtgagaagactagatcatttctgttggaagtggttgcatatttaacctgctgtgcagagcccagttaatttttcctttaactgtatttttaaaattctaatgtgaagtctgattctctcttgtggtacattggggacctcagctcttaaaggtctcatgttcccaatattttattttgattttttttttttttttttttttttttttttttagtgactgggtctcactctgttgcccacactggaatgcagtggcatgatcacagctctctgcagcctcaatcccctgggctcaagcagtcctcccacctcagcctcctgagtagctgggaccataggcacataccaccacatctgtctactttttgtattttttgtagagacagggtttcgccatgttgcccaagttggtcttgaactcctgggcttaagcagtcctgcctcggcttcccaaaatgctaggattagagccaccatgcccagcctattttgatttttgtttttttatgttcctttctaataaattgtaacaaatgatgttctcaagtacatttccagtttcttttcttttctttctttttttttttttttttttttttgagatggagtctcgctctatcgcccaggctggagtgcagtggcgcgatcttggctcactgcaagctctacctcctgggttcacaccattctcctgcctcagcctcccaagtagctgggactacaggcgcctgccaccatgcctggctaatttttagtagagacggggtttcgcagtgttagccaggaaggtctcaatctcctgacctcctgatccgcccgcctcggcctcccaaagtgctgggattacaggcgtgagccaccgcgcccagttgtgcatttctggtttctaagaatcaaaccacttggctgtttttaggagttacttcccatgttataaagctgaggaagctttttttttttttttttgagacagagtctctgtcacccaggctggagtgcagtggtgcaatctcagctcccgggttcaagcaattctcctgcctcagccttctgagtagctaagattacaggtgtgcgccaacacgtctggcttatttttttgtatttttagtagagatggagtttcaccatgttggtcaggtgggtctcaaactcctgacctcaagtgatccgcccatctcctcccaaagtgctggattgcaggcatgagcgcctagccaggaagctatcttttcttgagttatgaaactttgcaacagttgttcaaattggtgtttgtccttcctatagctttcatattttcaaattaattctgtatggctatataatttatgttttaaaaggcaattctcttgactttggaaatatggaagtctctcctttaacctattcttgttcccattcccagtctcatttgaaatcattccttttattgttagtgtgtgtatttttgttggtgtgcttttaatgcatccaagtatgcatcattttggataaaaaatacatccaaattaagatgttttaacacataggacaaacttgtgcactttttatgccaaaaaaaaaaaaaattgggttttccttcatgggatttctagaaacactgcctacactttatgaaaactacatagtattcacctgtgacaggtagagtttatcactattaattttatgaggctatttattactttccaatgcatccacttagaacaagctaagagtaaggctgctaactttaattccttgcctgattttattgtacagtgtgcacaagcacaatggtatgcttgtatatagaaactaaaaatactatgaagtacataagttccctatggcttatggagagttatttattaattaactttatggtagggctagtatgaatacctttttaacaattgtgtgctattacaacaatgaagattcaaatgactccgctttgaaggatgttttctctatatggtaaaatatatatgaagaagtcttgattacgtgaagatcacttgactcagaatacttcaatgtattttgttcacattaccactaagcatattatcagtaaactattaactgactgcacattatgtaatacgttgtactttttgttgaattcaccgaagttcttccatttatatgctatttttaatggcattccggctttaacattctgtgagtcttacaaatttgactcttgaatggcaaaataatgttagtatgtagaaggttaactttcatttataatataagtggtgcaggggttcaacattttaagtaaaaatatttttacacactacctctctctttttttttttaaagttttaacatcagaacttttgggggaaaaactacttcagggcttgactttttgtacaaattttaactgtaaaatacagatttatcttgtacgcattcatggaaatggaaatcaaagctgctattgctttttattttaattatcctgttaagggtatctatcaatggtattttcaagtagatctctgtttcttaaattattggtgaaataattgattactagatatattgtaaaaccaatagatcctggttatacgataaaatatcagctcattggtaggctgaatcaattatttcaagtgcaccttattaacaaaagtatcagtggatccaacataaaattttatagtactaaatgtcaagcctaactgtgaattttgttctgtatcttaagtaaatttatgataatgttctcgagctatcaacaaaatatatgtacttttgtgagctatgaattttctaattaaattttacatgctataacatgatttttacatgaatgatactttgtttataactatcaaatgtcagtattttactacaattttattataaagtgtacattatcactaaatgaacttcgattttaaaaatcaaattagctttagttgtatattattttttacaaataaagatagacttgtataaaggctactttcttgtttgaaattatatgaaaagttgcccacaaataccaggtgcccattatataaaataggtagggagaaaacccttgagttttaacaagatccttgcttccttaacttttaattgttaaaagatggaccccaaattgtatgtgcactttttgcaactgtgtatgaccatatggctatgggctggatggtaacttttaaaatgtggttaattctgatagtgtgaaaggttatgcaagctattcacccaaagttatctttaagattatttgaaactagtttgtaatgtgacagcttatcttctgaaattcaaattcacttagttatacttaattaatattaccatctatctagtatggcctatgttgattgaattcaatttatactgaaaaacttaaaatgtctgagaaaaaggccaggcatggtggctcatgcctgtaatcccagcactttgggagtctgaggcaggcggatcatgaggtcaggagttggagaccagcctggccaacatagtgaaaccctgtctctactaaaaataaaaaaaaaattagctgagcttggtggcgcacacctgtagtcccagctacttgggaggctgaggcaggagaatcgcttgaaccggggaggcgagggttttggtgagctaggatcacgccactgcactccagcctgggcaacagggtgagactccatctcaaaaaaagaaaaaaaaaggtctgagagaaagaacaacctttcctgagccatttctaattccaaattagccaccctgtcatcagcttagttggtcattgcactaactcttctgccaacaagtttagaggacaataggacaatcctaattccttccctccaagttaaaaacactaaaaatcccgagtataaatggaacatcgtgcacacagaactcttcacacctttgattgggttgcattcagtacccgatattcatctctgggttttgagtccgtgaaacaatggtgcagaattaaaacatccctttcattcccaaaaaatgaccccaatgcaatttgcatctttgttttttttctttttttgagatggagtctcactctgttgcccaggctggagtgcagtggcactatctcggctcactgcaagctccgcctcccaggttctcgccattctcctgcctcagcctcccgagaagctgggactacaggcgcccgccaccacgccctgctaattttgtttgtatttttagtagagacggggtttcaccgtgttagccaggatagccaggatggtctcgatctcctgacctcgtgatccgcccgtcttggcctcccaaagtgctgggattacaggcgtgagccaccgcgcccagccttgcaatttgcatcttaaatcactgttgcttcctagtttccagtgctgagtaagagcttgattaaatttgattttgaggaaaaactaaagttacaaaaatttaccaaaaaccagacctctctgttctgcctttaggtgctcaagtgtttaacagcaactgacagaaccacttctgattgtgtttcccttcttttagtttgatgtggggtttaaattggaagtatgtataccagcgacttggcagctgagttctaagcacagttttgggagtgttttgctgttaaacatggaaagcctttgtttttatcttgtgatggcatatcacgtgatgatgatggctgttatctgtagggtaaagcaaaacccagtgcctcctagctatgatcacataacatgctaaatacttaagtactctcagaaaagatattttggaaaccaaaataagtcttcattgcccaaacgaagtatatgtgcagtcaaatgactgtcattgggtggataactgggcattagaaggtaaatataaaggaaattaatcggttaaaagatccttaatgccgggcgtggtggctcacgcctgtaatcccagcactttgggaggccgaggcgggcggatcacgaggtcaggagatcaagaccatcctggctaacacggtgaaaccccgtctctactaaaaacacacacacaaaaatattagccgggcatggtggcgggcgcctgtagtcccagctactcgggaggctgaggcaggagaatggcgtgaacctgggtggcggagcttgcagtgagccgagatcgcgccactgcaccccagcctgggtgacaaagtgagactccatctcagaaaaaaaaaagatccttaatatgtctaccaaattcttccctaaaaacaagacttagataatattttaaaagctaatgtgtttatccagttgctttacaacacaattgtattttataagttaatattaaaattcaatggagtttgtattttatttacaaactataggtgtttttccacttataaaagctctcttttgggaattaagtttactctgaaagcagtattctctgtgtaatagaaaataaagaaaatttaatacccttattatctagttcattataatcccaagggatggataacaagataatacagcataagtaaagataactttttaaaaataattttcagtcatataaataatgtgcaaattcgttctccatatttaaaaaaaagtacagaaaaagctaaagtcttttggcagtaccatgcacatttatccataccatattctgttacaaaaaggaattgtggcttaaaataagagtgactataatttataatccaaattgggacacttttgagaatgaatgggtttgccacgaactatgccagtagaacaggctcggaccagatctgtctcaggtagactgcaatatgggtcaccctgttatagggtctctcaaaattttttttaaaaaactgcaatacacagtaagaaatgcattgaacactataatccaggacacacacactatgttttcatacagtaatgaaaaatgctctgattttctatttcacttttgtaggatgtgtattggaacattccaaaaacaatgtcaggatgccctgtttgaaaacactgtgaagtgctttacttttcacttgagatatttgccatgggaaagactatcatatttttccctaaaggagaataaaggtactgtattatctgcttgctagcttttttgtttgtttgtttgttttgaaataatttccaacgtagaaaagagctgcatgaaaagcataacctttgtccaggttatatcctcatttgctatctgtgtattttttcctgaaccacttcagaattagttaaagagattctccccttttatcccctttagacttaggcatatattttctaagaacaaggacattctcttatattttttcttatacaaccccaattatcaaattcaaaaaagttaacattgctacaatattatctaatatataagcaatactagaatctcatcaattgacctagtgatgtcctttacagaaattttttccttttatccaggatccaacccagaataagacattgagttgtctcatctcttttggcccctttaatctggagcagttcttcagcttttctttgcctttcataatattgacatttctgaacagtaaagataaattgtttcatagactgtccctcagttggggtttatctgtttcctcataattagattcaagtggctgggcgtggtggttcacacctgtaatcccagcactttgggaggccggggcgggtggatcacttgaggtcgggagttgaaaagcctgcccaacatggtgaaaccccatctctactaaaaatacaaaaaatttagttgggcttggtggtggacatctgtaatcccagctactcgggaggctggggcaggagaatcacttgaacccgggaggcggagattgcagtgagccaggatcacaccactgcactccagcctggatgacagagcaagactccatctcaaagaaaaaaaaaaaatagatttaagttatgcgtttttatcaggaatattacataggtgatgttatatctttatttcaccatgtcaacaggtacatcatatcagtttgattcaatattggtttatcaagtgagaagtgatttggaaaaaataaaataaaatatattgccaggtctggtggctcatgcttgtaaccccagcacttcgggaggctgaggtggaaggatcatttgagcctagaagttcgagagcagcctgggcaacatagggagaccccgtctctacaaaaaatacaaaaactagctgggcatggtggcatgcacctgtggtcccagctactgaggaggctgaggtgggaggatcgcttgggcccaggaggtcgaggctacagtgagctgtgagctatgagtgccactgcactccagcctgggtgacagagaaagccctgtctcaaaaaataaatgagatgttctaattattcttgtgctcattaaaaacgtgaatggagccaggtacagtgactcacacctgtaatcctagcactttgggaggctgaggggggcagatcacttgaggtcaggagttccagaccagcctggccaacacggcgaaaccctgtctctacttaaaatagaaaaattagctgggttgtggtggcagccctctgtaatcccagctactcaagaggctgaggtaggagaattgcttgaacccaggatgtggaggttgcagtgagccgagatcgtgccaccgcactccagcctggatgacagagctagattctgtctcaaaaaaaaaaaagaaaaagaaaaagaaaacctgaatggatccagatgaaagacatgtgttttctatatccatgtgttccgcatctttgattgttttccttttgaagaaacaatagaaaatggtgacctggcaccagtattctcgaatgtcctttgcttaaccacatttctgaactcagtaatgactttctctggcattggtctgaatgaaaagaaagcacccaaatgatacctaaatctgtgactaatggggctggtcagtagtcagagtgttcagagtgggaggatgttgccttgggattctttggcttgtgaatacacctaactccaattgacgtctaacttagattcaaaggaatggattggctcgtgtaactgaaaaatcagggctaagatttcagcacagatcggacacagtgccatctgatagaattttctgctttgtccagaggggagtcactagcccccatgtggctgctgcatacttgaggtgtggctagtgcaactgagaaactggatttcaaattacatgtcattttaattaatttaaatgttaatagccacatgtagacagtggctactgtattattttacagcacaaactggaatccctctccatttcttgcttttgttttcccctgttaccttttttcccttaggccaagtccctccttatggtggcaaagatggcctccagcaaccctggcaacattccgtcacattaccaaccacctggcagggagcctgtcttcccccatggtgacagccaaagcccagagaccaccctcactgaccctgtctcagtcatgtgcccatccctaacccaatccctataactcctaattgtcctagtctgggtcatgggcccaattctggacctattgagggagggatggtcccctaaagaaaaatcagggatcagccaggtgcagtggctcacgcttataatcccggcactttgggaggctgaggcaggtggatcacctgaggtcaggggtttgagaccagcctggccaatatggtgaaatcctgtctctactaaaaatacaaaaattagtcaggcatggtggcggacgcctgtaatccgaactacttgggatgctgagggaggagaatcgtttgaacccgggaggcagagtttgcagtgagccgagattgcagcactgccctacagcctgggcaacaagagcaaaactccatctcaaaaaaaaaaaaaaaaaaaaatcagggatcagggttctgttaccacaagaaagaggaagaactacaggggagggaacacagtgggtatcacttgcagctttttttcttttttcttcgctctgttaccaggctgaagtatagtggtgcaatcataactcactgcagcctcaaactcctgggctcaagcaatcctcccacctcagcctcctgagtatctgggactatggatgcgtgccgccacactcagctaatatttttcggagagacagggtctcactatgttgcctgggctagtctcgaactcctggcctcaagcaatgctcctgctgccttgtagatttagagtatttgggaacacattttttataaaatgtcctgcacaaagtaaattggggacagagagcagtgctctatcaaaggaaaatggtggaaattaaatacagagaccagtggcagtgttctacctttaaaggaaaaacttaaaactcctgacagcgactatactaggacttctgttttcaagtgttattgcttattttgattctattttaaatacatctgctgagatgggcagatcacttgagcccaggagtttgagcaacatagcaagacctcatctctacaaaaaatttcttaaattagccaggcatggtggtgcacacctgtagtcccagctactcaggaggctgactgagacaggaggattgcttgagccttggagtttgaggctgcagtgagctatgatcatgccactgcaatccagcctgggccagagcaagatttgtctctaaaaaacagaaaagaaaagaaaagaaaaaaatatatatatatgaaataaatctgacataaattgaatatataaagaatatataaatgcaatataaacttcaatctgaaatggcagtttcaaatcctattactttcaaagtatagaaatgataggaccatgggtctcagagaggaggttgcaaattcaaatgcccaaagggccagagtggggcagggcaggtggggctggtaaacaggagatgcccgcccccagcaaggcaggggccaccacattcgatggttgtcatttgggtatgtgtgggcccagtgttgtcagctcttataacttttttttttttttttttgagactgagttttgctcttgttgcccaggctggagtgcaatggcacaatcttggctcaccgcaacctctgcctcccagcttcaagcgattctcctgcctcagcctcccaagtagctgggattacaggcatctgcaaccatgcccggctaattttttgtatttttagtagagatggaatttcaccatgttggccaggctggtcttgaactcctgacctgaggtgatccacctgcctcagcctaccaaagtgctgggattacaggcgtgagccaccacgcccggccctgcttatccagattttcataagaaatgtccttttttttttttttttttttttttgagacggagtctcgttcttctgccctggctggagtgcagtggcaagatcttgggctcactgcaacctctgcctcctgggttcaagcacttctcctgcctcagcctcccgagtagctgggactacaggcacgtgccaccacgcccagctaatttttgtatttttagtagagacgggctttcaccatgttggccaggatggtctcaatctcttgatctcgtgatccgtccacctcggcctcccaaagtgctgggattacaggcatgagccaccgctcctggccgagaatcccccttcctaaattggtaaaatctgattcatcagaattgcaattttgatcaaagccagtaactcctcacacaaatccttctatgtgtgcagaaagtgagcgtctgaaaactccaggcggagtttttgcgctaggttatctaccagaagaaaggacaagaaaggctagaatttgactaatggttccaccccccagattgtatcagcacagcattcctctttcactcagtctcttagcaatgcttgcaactacaaggaaacagcattcataccattgtttctaagacctgaagcaggttacattcaaacccagcactgttcttatagaacataagagttttgttcccaggctgcttctctgccagcatgtgatacccttcaataaatggtaggtaagttgcatatcaggttttctcctgcattcccagagggcttcagctgctgtctcaggtatgaacccaaaatgactcaggcaaaaatgtgtatgcttagtgactcagaaactaaatcattaacttggtaagtacatgcacgggtaaggaggaattcaaggagagacttagaacataggccttccagtaatgccactgatgatgactgcctgagtacagcaacgctgaacggtgtcacttctcaggtggaccagtgacgaaccctagaatcaccaagaatctcaaatcagtcattctcaggagcaacaatccacatagggtaatttacaaagaatgctgatttcaattgtttgaatccttacctggtgaaacaagaaaatgtggaaaaagctccttgactttaaaaatacacacccacacacttttttttttttaaagggacaagggcttgccgtctcccacacaggctcgtgggcggtggtgcgatcatggctcactgcaacctcgaactcaaggattctggcaatcctcccacctcagcttcccaagtagctgggactacaggcatgagccatcacacccggctaattttctttttttcttttcttcccctcaccccaatttttttttttttttttttgagataaggtcctgctctgtcgcccaggctggagtgcagtggtgtgattatggctcactgcagcctcaaactcctgagtccaagtgacctcacaccttagcctcctgagtagctgggactacaggtatgtgtcaccacgcctggctaatttttgtattttttgtaaaggtgaggtttcactatgttgcccagtctggtctcaaactcctgggctcaagcaatctgcctggctcagcctcccaaaagtgctgggattacaggcgtgagtcactgtgcctggcctccacatgactttctactagttgattttaaactgggcatatgcatttacacacacacacacacacacacacacacacctgatctgcctagatgtgaaattaaacttctagagcacacgcatatacacaacgccagacaatatgggaacagtgattacaaacaaatcccactagaaaatgacaaactgtaataatttttcagtccccttttgaaggcaagaggtttataaacctctgcaattcaattgcaacacatcagggttcttctggtgagctggcctcagtgtccttcctccacccccagggtgccttggctcatgttcacagggcccatgcccagtagggctggcatgtgtttccaacagccgagcagacagggccagcagagagggagaaaataaacggtaaagggagacgcgccaggagagcaggcagaatggccgggaagctggccaaacgggagaggctgaatgggcgacatcagcccttgaccaggcctcagctatcccagctgtccttcaccactcactgtgtggataccaggaggatacaagccccctttgcctgggcgtcaccaagaatccataaaccacgcagtttatttttatttttatttaattttatttttttagatagtctcactctgtcgcccaggctggagtgcactggcgtgaccttggctcattgcagcgtccacctcctgggctcaagtgattctcgcgcctcagtctcccaagtagctgggattacaggcacctgccaccacacccggctaatttttgtatttttagtagagatggggtttcaccatgttggccaggctggtctcaaactcctgtgctcaagcaatccactcacctcagcctcccaaagtgctggaattagaggcgtgagccactgtgcctggcctatttttattttttgaaatagtcttgctttgtcacccaggctgggtgcagcacaaataacacggctcattgcagcctcgacctcctgcgctcaagcgatctttcctcctcagcctactgagtagccgtgtgccacaggcatgtgccaccctgcctggctaatttttttttttttttttggagatggagtcttactctgttgcccaggctggaatgcagtggcactatctcagatcactgcaacctccgcctcttaggttcaagcaattctctgtctcagcctcccgagtaactgggattacaggcgcatgccaccacgcctgactaatttttgtatttttagtagagacggggtttcgtcttgttggtcaggctggttttgaactcctgacctcaggtgatccaccagccttggcctcccaaagtgctgggattacaggtatgagtcaccgtgcccggccgcctggttaatttttaaattttttgtagagaccaggtctcaccatgttgcctatgctggtcttgaactcctgcgctcaagcttcccaaaaggctaggattacaggcttaagccacggtgcctgcccatgtggtttttagaccagcaggttctgtagagcaaaatgttcatgattttgaaggatgacaaacctgacagaggaggcaacgccaccttgacattcctcagtcgtagtgccacagtggtctcgtatttcaaacctggttagagtttgtcctcttcaggagagtttgtgtggctgttttgcagtggaggagagatgacaaagctgataatgcttatggtgtgggtattttctttttctttccttatttgctttgtgaagacaaataatggttaaggatagataaaattaaccgggtgtggtggtgcatgcctgtaatcctagctactcaagaggctgaggcaggagaatcgctagaacctgggaggcggaggttgcagtgagccgagatcgcgccattgcactccagcctgggtgacagagcgagactcagtctcaaaaaaaaggatggataaaatatttaacagtggtcatacataattcattcctgagtcgacacccatttccaggccagcagttcgctctcaattaggggttctcagaacacggaaccaccgtgtctccttggtagactgccattgtgcttatttttactcttttcttcctaaggctaattgtttttaccttttccttgttgagtactcattcctagatgtttttatcaaaggcaacaaaaataaaaattataggcaggactttttttgtttgtacgttttttgagacgaagtctcgctctgtcgcccaggctggagtgcagtggcgccatctcggctcactgcaacctccacctcccgggttcaaacagttctctgcctcagcctcccaagtagctgggactactacaggtgcccaccaccatgcccggctaattttttttttttttttttagatggagtttcactcttattgcccaggctggagtgcaatggcacaatcttggctcactgcaacctccacctcccaggttcaagtgattctcttgcctcagcctcccgagtagctgggattacaggcatccactaccatgcctagctaatttttgtattttttaatagagacggggtttcacagtgttggtcaggctggtctcgaactcctgacctcattatctgcccgccccggcctcccaaagtgctgagattacaagcgtgagccactgcacctggccaattttttgtatttttagtagagatcgtgtttcaccatcttggccaggctggtcttgaactcctgacctcgtgatccacctgcctcagcctcccaaagtgctgggattacagctgtgagtcaccgcgcccggccagggctttttgtattcatgtctgggccttaaggtttaactcagagcttcagagacataactgggaaggaaaaatgtatatttgtacatataaatattgtgtaagaaaagtaaatcagttaaggaagctgtgtgcccacagaagtaatatgtgattttaggagaaattttagaaaaaataattactattcagagataaccactcaagtttttcagcatatgcgcacatcaaatgtatattcatattagacctataaaattattctgtagtttgctttttttagaggacaatatattgcacctatcctttctctgtcagtatggctctgcatcatttataatggcttcatcgtatttcactgtatagatgcaccattattttgtaaaaccaattccttattctgagctgttttcattcattcgccattatgaacagtgctgtggtgaacaactttgtaaatacatccttttgttccttgtccaattatttccttaggataaaaggaatctttggtcaaggtgtacacatttttttggaaagggagggggtggtttatgaatatatccaatttccttccagaaacgttgctctaatgtacacacttacagggatatgtgtgtctttttctccttgaaaacaccagattttattattattattattattattattattattactattattattttgagacatcaaaataatccagctccatcacccaggctggagtgcagtagtacagtcacagttcactgcagcctcgacctctctggctcaagcgatcctcccacctcagcctcccaagcagctgagactacaggcatgcagcaacacacccagctaactttttttgtagagacagggttttgccattttgctctgggtggtctctaactctgggtttcaagtgatcctccccttcagcctcccaaagtgctgggatcacaagcgtgaaccactgtgcccagcgcaccattgattacattttagactttatttagatagcaccagttttccactaatgtccttcttctggcccaagacctaatccagaatactgcatcgcatttcatacccattctttgttacagcttcataatatgtaaccaatttaatttatttaacaaccccctattgttggacctttgggttatatcaggttttttctgtttggttttctgttttgagatggagtttcactcgtcgcccagactggagtgcagtggcaacatctcagctaaccgcaacctctgcctccagggttcaagcgattctcctgcctcagcctcccgagtagctgggattacaggcatgtgtcaccacaccctgctaattttttatttttagtagagacagggtttctccatgttggtcaggctggtttccaactcctgacctcaagtgatccaccggcctcagcctcccaaagtgttgggaacaggcgtgagccacagcgcctggtctctgatggatatttttaaaaaaatcactgtggtattcatgtggggcagagggtgagggggaggcagggattagtcctggcaagcaggggtggaggcgggaaggagtggacaaattcaaggtatttctgaggagcagtggaatctcttgaccaaggccttcttcagcagggagatggagccctgtcctgagggactttgcagcctggctggtaagacaagcttcttccccagggaattaaacaccagtggttaacagattagcaacttagagacgagaaagcggtttccaaactctaaaacacagaaggaaaacccgtgacagatttggccacataagtatttaaagcttgtatctgtctctctctctctctctctctctctctctctctgtccctctcccccgcccctcccctctgtctctcacacacacacacacaaacacacacacacagaacaatttaagattaaaaggtgaggggctgggagaaaactgagaaaggatggtcatctaggatttatcagccgctcccagcaatcaagaagaagaagacagataactgcacaaaggaataggaactgataattcccagaagaggagactgggaaaccggtaaacctaaggcaatatgcttaatctcattaggaatcaggaaaatgcaaagtaaacaaaggcccacccctaagagtagtagccaaatgtaaaggagggaagtgggagcaggaggagcctctccccctgggatggggaggagccggccaggttctgcggaagcagaagggggtgggtgtactactgccatggcgcaaacacacatccaagggctctgcagggggccccacccttaccccccagaccatttctaggagtaggggctgaacaggacccagtggaggctaccgtcctgcattgcgagggttaagtaagaggctgaaggtcaagtgcgaggtcctgcagggcacttccagcggctctgtctcagccggcccagtggccatgcggaactgggagcaaggagagtgggagataaaaccctgtttcagtggtttagcgtgggaaatgctaaagtgatctgtgtaacacagctcctgggtggggaagagatggggaagtagcctgtggcctggaggtggctagggacagattctcaggagggctggaaggggtcaagggcagggctgcgctataacttccctgggcagtgagcatcttggcctgcaggggcccttccaataagaaataggacctggtgtggtggctcacacctgtagtcccagctattcacgaggctgaggtgggaggactgcttcagtccaggagttggaggctgcagtgagctatgatcacaccactgcaccctggcctgggccacatagagagaccctgtctctaaagaaattttttaaaaattacctgggtgcggccgggcacggtggctcacgcctgtaatcccagcactttgggaggccgaggcgggtggatcacctgaggtcaggagtttgagaccagcctgaccaacatggagaaaccccgtctcttctaaaaatacaaaattagccgggcatggtggcgcatgcctgtaatcccagctacttgggaggctgaggcaagagaatggcttgaacccgggaggcggagtttgctgtgagccgagatctcgccattgcactccagcctgagcaacaagagcgaaactccgtcttaaaaaaaaaaaaattagccgggtgcagtgccagagtagttccagctactcaggaggctgagatgggaggattgcttgaacccaggaagtcaaggctgcagtgagctgtgatcccacaactgcactccagcctgggtgatagagcaagaccctgtctctctctcagaaaaaaaagaagtgcagattacaacttggtataataatgaataattactattatataataacacattttatttgacctaaagaacatttttttgccttctgatcctagaagtaattcacatgtgttcgtgggcgcatgcgtgggcctgtgcgtctaatggagaggtcactgcagaaaggaagctcagggttctcccaggcagcggcagggtgtggaagtctttctttgcctttttgaccattttgtagagggaagctgctctgctgtccagccctgcggaggggggcagggtctgtgtccccaagatgacagagggttggggagagttcactccagtgaccagtggttggccgaagagtgctttggagttcagcccacctgggtttgaatctacatcctccctgtgtggagctgagcctgaccagtgcgtgtgttcaccaagctcaggcgtctttgtttgtgtgtttttggatggaaaggggaagcagcccttcacccgctctctcctcccttgcagccgtgccacagggccagggttgcaatgaaggcaggtctcaggcaggtctcggctctgctctggcaaacgggccccagaggtctgaggaatccagccagctcctccaagctcatgtccttggtctcagacctacaggctttgtgcacatcctaggctggtgacagcatgtgtgtgtgtcacggctggagtggcagaggccctgtgggagccgcagacccagggccgctccataggtgtcaggctgtgtggtctgccagagtcccacacctgttcgtgtgaggggaaggtgcccgagcaatactgtagccaaccaaataccatagtgtcttcaatactactcatttcgcccatggaaaattatgcctaagccaccatacgggttaatgaacgctccagcccaggtccgaagagatgcctttagcacagggacgtgtggcagtgtctggagatgtgccaggctgtcacaggctgtgctcctggtgtggggacactgctgaacccacaggacagcctccacagcaaagcgttacatgctgaggtccagggaccctcccataaccaattccagagtgagggcttctgattggagagccccactctgcgtgtcccttagtcactcctgggacctaggtcaggcgtacacacacctgcaccacactgcctatatacaagcactttacctgtattgtatttatttatttttggctcactgtgttgcccaagctggcctcaaacttcctgggctcaagtgctcctcctgcctcagcctcccaggtatctgggactataagcgagtgccactgcacctggatttttatgcaggtattttaggtgagtcattggaggtacaatgctaccaacttgccacttcaggtggctccatcctgaagagcctcagcctcctggtctgtacaatggtaacagtgccctgcccccggggagctgtgggggtgagtgagaggctgtgtgtccagcccagtgtccggggtcactcagaaagagtggtgtctgctcagcgggggcagagcacaggcttgaggccagacttcctgggtaccagcaattcaatgagtgaattctttgagcaatgcctggcactgcacaagtcctgtggccgtgttgggtaccactgacattattgctgttttcaggtttgtttgtttgtttgtttgtttgttttttgagtcagagcctcgctctgtcacccaggatggagtgcagtggcgccatcttggctcaccgcaacctccgcctcctgggttcaaacaattctcctgcctcagcttcccgagtagctgggattacaggcatgcaccacgacacctggctaatttctgtgtttttagtagagatggggtttcaccatactgaccaggctggtcttgaactcctgacctcaagttatccacccacctcggcctcccaaagtgctgggattacaggcatgagccaccgcacccggcctgtttctagtttttgacagttgaacaaaggtgcttggcctggaacagtgaccaccaggtcacctcactccctcagtgtcaggggtctctctccaggctccaattgctctcatctcatctcagtccctcctacctgtcctcatccttatcactgctcctacagctggagaccagggtggggcacgtttgagatgggattcccattcagcctgtgcttcttggagacccagcttccctcgctccctcgtgctaccccatcaccctccactcccccatgctctcttccctagactgggcaggccccagctgccttcccacctggtgccccgatacacagccacccccacagtggcctcaagaggcttctttcctggccgggtgtggtggcttacacctgtaatcctagcactttaggaggccaaggtgggcggatcacctgaggtcaggagtttgagaccagcctgaccaacatggagaaaccctgtctctactaaaaatacaaaattagccaggcatggtggctcatgcctgtaatcccagctactcaggaggctaaggcaagagaatcgcttgaacctgtgaggtggaggttgcagtgagccaagattgtgccattgcactccagcctgggcaacaagagcaaaactctgtctcaaaaaaaaaaaaaagaggcttctttcccaaagagagactttgtcttcaaggtgacccctggctgacccctggcatggttggtgggagtggtgatggggcagcgatggggccatttgaattaaaatgccctctgcataattcacagaaattcatgagtcatctttatctgggaaaaccccaatggagtgagctgggacccagggctgcagactgatagacagagggaagcggcctccctggatcccggtcctcactcccgtgcctgctgttgactattctgcggtcaggaggcgtccctttgcctgcagtcctgggacagtggagcgcaggggacactggggcttcccaaggaagtgcttgttcttctcttaaatcagaaatcagggcactcattatgtgtctatccatcaggccgctgtcctctgcagagacaccttgggtgtcccctcctggctccaggtggttctggaggatggcagagccaggaccatgggctgccctgaaggtggttccaacctgctctatttaaaccaagggtcctttaaatttgtctcttttcatttaaatatgctctttaaaaaccagcaggctgggcatggtggctcacaccatgtggatggcttgaggccaggagtttgagaccagcctgggccacatagcaagacccatctctataaaaaaaaatttttttttttgagatgaagtcttgctttgtcggccagtctggagtgcaatggtgtgatcttagatccctgcaacctccacctcctgggttcaagctgggattataggcgtgcaccaccacacccggctaatttttgtatttttaatagagacggggtttcaccatgttggccaggctggtctcgaactcctgacctcaggtgttccacctgcctcagcctcccaaagtgctgggattacagatgcgagcccgtaattacaggcatgtgcccagccctaaacaatttttttttaaaagacagaaaaactccctgccccctggagttaagattcttgagaaggatacttgattaactgatgaataagacagtcagaacagtgatgagctctttgaaggatatgggtgaggggcaaggccacgttagccaagggggtcagggaggacctctgtgaggaagtggccttggttgtgaggcctgcaggctgggagagagtgatacagaagacctgggggaagggaggggctacacggcaatcactggttgtactgagaagtcattttgcacatgtggaaatatatttctgaagtaaattcctagaagagggattactgagtcaaaaagcatatgactttctaattctgatagatactgccaacttgtcctctttggggtgaaccaccaaagacactcccatctaccaaagacaagagtgcctgtttccccacagctttgccaatcctgtggattggcactaatctgatggttgaagaatgtatcttatgcccgtctggggtggctcatgcctgtaatcccagcactttaggaggccaaggcaggcagattgcttcaggtcacaagctcgagaccagcctggccaacatggtgaaacctcatctgtactaaaaacacaaaaattagccaggcatggtggtacacaactgtagtctcagctactcgggaggctgaggcaggaggatcacttgacctaggaggcagaggctgcactgagctgagattgtgccactgcactccagcctgggcagcagaacaagacttcatctcaaaaaaaaaatgtatcttattaagaatgagattgaacatctctttatatgattatgagctacttgaattatcttttctttctttcttcctttttttttttttttgagatggagttttgctctgttgcccccactggagtgcaatggcgcaatctcggctcactgcaacctccgcatcccgggtacaagtgactctcctggctcagcctccctagtagctgggatgacaggcacttgccaccacgcctggctaattttttgtatttttaatacagacggggtttcaccatgttggccaggctggcctcgagctcctgacctcaggtgatcctcccacctcagcctcccaaagtgctgggattataggcgtgagccaccgcacctggccttgaattatctttctacttgaattatcttttctcccaaccaactgttggtatcctttgctcatttgatgttttccttataaatttctagaagccttttttttttttttgaaacagagtctcgctctgtcacccaggctggagtgcagtggcacgatcccggctcactgcaacctccgcctcctgggttcaagcgattctccttcctcagccttccaagtagatgggattacaggcgcctgccaccactcgcagctaatttttatatttttagtagagatggtgtttcaccatgttggccaggctggtctcaaactcctgacctcatgattcgcccgtctcgccctcccaaagtgctgggattgcaagcatgagccaccgtgccctggctctaggagccttttaaatatgaaaaagattaacttttttatttttttgagtcagagtctcgctctgtcacccaggctggagtgcagtggcgcaatctcagctcattgcaacctctgcctcctgggttcaagcgattctcctgcctcagcctctgagtagctgagactacaggtgtgtaccaccacacccagctaatttttgtatttttagtagagatggcgtttcaccatgttggccaggatggtcttaatctcttgacctcgtgatccactcgccttggcctcccaaagtgctgggattacaggcatgagccactgcgcccagcccgaaagagattaacttttaactatgatatgtgttgggaaatatttttttcccagcttgtcatgttactttgactatgatatgtgtttgcaaatatttttcccatcttatcatattacttttctattttctttttcccccatcttatcatattactttcctaacaatcaactttactgaggtatgatttatgttaataataaaatgtgctttgaaagtacagtttgatgaatgttgacaaatgcaatacacccatgtaaccaccaacacaagacacagaacatttctgtgactctaatgttattttagaatatgagtataattgttttggccatggaaaaacttttctttttgtctccctctgtggcgcaggctggagtgcagtggtgtgaccacagctcactgcagcctcgaactcctggggtcaagcaatatctctctcctcagcttcccaagtagctggactaaaggcacgagccactaaacctgactaattaaaaatgtttttttgtagagatggatttctccatgttacccagtctggtcttaaattcctgagctcaaaccatctctttctttttttttttttttttgagacaaagttttgctcttgttacccaggctggagcacaatagcgcgatctcagctccttgcaacctccgcctcctgggttcaagcgattctcctgcctcagcctcctgagtagctgggattacaggcatccgccaccacacccagctaattttttgtacatttagtagagacgaggtttcaccatgttgaccaggctggtcttgaacttctgacctcaggtgatccacccgcctcggcctcccaaagtgctgggattacaggcatgagccaccacgcccggcacaagccatctcctgcactgccaaagttatgggattacaagtgtgacttacggcttctgcattttgtgttgtagtaagagatgcttttacattctgaggtttttaaataattcattgtttacttctagtctatttctgccttttttttttttatacattttgctcttcgatctatttgcagtacagcctgaggttggtgtaaggtttgagtctaataattttttttctaggggtgtatccagttgtttctgccttgcttgaacaaagtgaactaatagtagttcacgaaatctactggtttataatgtcacataccaaaggcttgtgtctttaaatctatctctagacttggtattctgctttctcattctgtctctccaaagatttccatatatatatatatatatatatatatatatatatatatatataaatataaatatattctatatattcatatatatatattctatatattcatatatataaatatattctatatattcatatataaatatattccatatatataaatatattccatatatttatatataaatatatatcatatatttatatataaatatatatcatatatttatatataaatatatatcatatatttatatataatatatatcatatatttatatataaatatatatcatatatttatatataaatatatatcatatattaatatatatcatatatttatatattaatatatatcatatatttatatattaatatatatcatatatttatatataaatatatatcatatatttatatataaatatatatctacattttttgagacagagtctggctctgtcaccccagctggagtgcagtggtacgatctcagctcattgcaacctccacctcccaggttcaagcgattctcgtgcctcagcctccatagtagctggaattacaagtgcaggccaccacacccaacgaatttttttgtatttttagtagagacggggttttgctatgttggccaggctggtctcgaactcctggcctccagtgatccacctgtcctggcctcccaaagtgctgagattacaggcatgaaccaccacccccacccatttccataccattttaattattgaggatttatagcgagttttaatattgggtaggtctaacctcctatcttagtttactattgtttctgtaacttaatagcttaaaacaacatagatttaatatcttacatttctggagggcagaagtccaaaagggttctcatggactagaatgaaggtgtccacaggattgtgaagtctcctctctggagactgtcagggaggctctgctctctgccctttccagcctctgcaggcagccgggtgttccctggctcttgctttccttccttcagagccctcagtggctggctgagtctttctcacgctgcctccctcttccgcttccaagaatccctgtggttataatgggctcacctggataatctgcccatctcagcagtaactgaccagcaacctaagttccacctgcaaccttcattccctcttgccaggtaagagcatattcacaggctccgggcatcaggaagtggacaactctggaggaccattattctcccaaccatgtccccgtcattgtttttcctctttgttttgagacagggtctcagtctctcattgtcacccaggctggagtgcagtggcgccatcatagcttactacagcctcatctcctgggctcaagtgatcctcctacctcagcatccagggtagctgggaccacaggtgcatgccaccgtatccagccattttttaaaaattattttattttatttattattattattattattatttttgagacggagtctagctctgtcaccgaggctggatgcagtggcgtgatcccggctcactgcaacctccgcctcccgagttcaagtgattctcctgcctcagcttcccgtagctgggattacaggcatgcaccaccaagtctggccaatttttgtatttttagtagagatggggtttcaccaagctgaccaggctggtctcgaattcctggtctcaagggattcatctgcctcagcttcccaaagtgctgagatcacaagcatgagccaccatgcctgtcctgttttatttgggtgacattaaatctatctattactttaggaaggacatgataagcattttcatttggacagactcctctcctcaggactatttacaatttacctaatgtaagtcttgtaaatctctgacgtggcatatgcctagtactttatcttataatttgtgtcttttttttcattctgtgttctcttgggttgttattctcctaaagaaatcagtctatttaaattttctgcctttccaaattatattttcccaggaaattagccatcgtatccaagttgtaaatttcaaatgtaagcagaacagtctcctattattatttacatttcttctatttctatagttatttccccctaatcatttcttattttgtgcatttgagccttttgccttcttttcttgattaggttagcttgctttttgtttcatttttcccccctccaaagaagcaacttttggatttagtcatttattctgctctattttctctctctccttccttccttccttccttccttccttccttccttccttccttccttccttccttccttccttccttccttccttccttccctccttcctccttccctccctccctcccttcctttctctttctttcttgacagaatcttgccctgtcaccaggctggagtgcaatggtgcaatctcggctcactgcaacctccacctcctgggttcaagtgattctcctgcctcagcctcctgagtagctgggactacaggtgcatgccaccacgcccagctaatttttgtattttttttttttttttttttttttgagacggagtctcgctctgtcgcccaggctggagtgcagtggcgggatctcggctcactgcaagctccgcctcccgggttcacgccattctcctgcctcagcctcccaagtagctgggactacaggcgcccgccactacgcccggctaatttttttttgtatttttagtagagacggggtttcaccattttagccgggatggtctcgatctcctgacctggtgatccacttgcctcagcctcccaaagtgctgggattacaggcatgagccactgcgcatggccgctattttctattttaatactgtctggctttatctttattaattcctccaatctcccttgatttattttattcttttcttatttctttatattttatttactcatgtagggtttttttgtttgtttgtttttgtttttttttatgagatggactcttgctctgtcacccaggctggagtgcagtggcacgatcttggctcactgcaagctccacctcccccggttcacgccattctcctgcctcagcctcccaagtggctgggactacaggcgcccaccaccacgcccggctaatttttgtatttttagtagagacggggtttcgcagtgttagccaggatggtctcgatctcctgacctcgtgatccgcccaccttggccttccaaagtgctgggattacaggcatgagccaccacacccggccactcatgtaggtttttaaggatataaattttcgtctgaggacatttttatttgaaccccgcaggttctatatgttgtttttattatttttatttaatgtgctgcaacttttttttgtgcttgctctttgctgtaagagctgtttaagaaagtcttggtcaggaggggtggctcatgcgtgtaatcccagcactttgggaggccgaggtgggaggattgcttgaggccaggagttcgaaaccagcctggtcaacatagcaaaaccctgtctctgcaaaagaaaaactttaaaattagctgggcatggtggcgcatgcctgtagtcccagctacctgggaggctgaggtgggaggatcacttaagtcccggaggacgaagctgcactgagccgtgatcacaccactgcactcagcctaggcgacagagggagaccctgtcttaaaaagcaagaaaagaagaaagtccattattaaggtcttttaataactgccctgtgtcattgctttgtgattacagagtgctgtctgtgctattttcattctgtggaattttcctccaaatagctcactatggggtcagtatttatgactgttccattggtactggagaggcagagtatgttgtatattttcagggttctcagcttaaaatatttgtagaattctgatcttttgcattcttacttatttctgtccacttcatctgtcatgatatgagaggggtaattattataattttgtgatttcaattactattattcaaaactttgctggctaatcttgacagctaagttcactaaacataagatgcaagttgagctcaaaaatgttaaaatgtaggggaaggaaagtgtcttcgaatcaataggataatgcatgtttgtttcagcaaatcaactgtgggatgtttttacattttacaagaaaaatcccactgcaggtctagtttgtgattttgttaaatttgtagatttttttcttttttttttttttgagacagtctcactctgtcgcctatggtggctcacacctgtaatcccagcattttggggaggccaaggcaggagaagcctggagtgcagtggtgtgatctcagctcactgcaacctccacctcctgagttcaagcgattctcctgcttcaacctcccgagtaactgggattacaggtgcccaccaccatgcctggctaatttttgtatttttagtagagatggggtttcaccatgttggccaggctggtctcgaactctcgacctcaagtaatcctcccacctcagcctcccaaagtgctgggattacaggcgtgaaccactgccccgggctaaatttgtagattcttttggggaatagctggtagctttatgaagtggagccttctcttcagcaaatatggtgtttccccatttctttccttcttcttttatgttccttcatagttttacggttttcttcttcaggctcctatacgtttcctgttaggaatatttctagggattggtctttgttctcctatgaagggggtatttttaccactatgtcccctaactggttgttgttggtttatagtaacttcccctcctgcttcttttttgtgtaaagttatttagtaaacagctccctcactatttccaattggttaacacttccagagggataagacaatagaggatgcttcctttttacaaaaatgccacccatatttcataacgaagaataactttttaaataacagattaatttttgtccttgcaaaagtaatatatattcactacacagatttataaaatatagagggatgccgggtgtggtggctcacgcctgtaatgtgctttgggaggccaaggcaggtggatcacttgaggtgaggagtttgagaccagcctggccaacatggcaaaaccccatctctactaaaaatacaaaaattagcagggcatgatggcctgtgcctgtagtcccagctactcgggaggctgaggctgaagaatcgcttgaacccaggaggcggaggttgcagtgaactgagattgcaccgttgcactccagcctgggggacaagagtggaactctgtctgaaaacaaaacaaaacaaaattagccagacatggtggcgtgcacctgtaatcacagctactcaggaggctgaggcaggagaatcgcttgaacccaggaggcagaggttgcagtgagccaagattgtgacactgcactctagcctaggtgacagagtgagactctgtctcaaaaaaaaaaaaaaaaggaatgaagtactgatacatgccacaacatggatgaaccttgagaacatgatagtacgtgaaagcagtcaaacacaaaggccatagagtatatgatttcatttacatcaaagtatccagaagagccaaatccatagagacataaagtagattagtggttgccttggaggtgtaggggaatgggagggttgcagagtgatgataagtggggtttctttttgggcgcatgaaaatggtggctgcacagctccacaaatttactaaatataccattgaaacgtatactttaaataggtgaattgtatagtatgtgaattatatctcaataaagctgttaagaatgattcacaaactctactcattcaaaatatgtcaactctactctgccagatggtgagaacacggccctgaacaagaccaaggccgttcttgtcttcacaggatgctattctggtgaacttcctctggaactatattctatatccttacaaagaaaatacttgtcttgaacttctgagctcaagtaatccgcctgccttggtctcccaaagtgctgggattacaggcgtgagccactgcacccagcctaattgacatttcttgaagaatagcagtcttcaggtgattgaacaaacctgcctattcagaatctgcattttaacaagatccccaggcgatgtcattcacctggtacattccttttttaaaagcttttttctttttgttgtttttagagacaggactcattatgttgcccacgctggccttgaacctctgggctcaagagatcttccccactcagcctccagagtagcaggcgtgcaccatcatgcccggctcattgaaatttgggaagcacagatctagaggtcaaccttttatccaaagcagaaaccctatgtgatttcaattgtcaaactttatgtcaactctctatgcaaagcacaaaccccatctgtaccatccctatgtatcaggaacaggctgggaagtgacaattgaactctgctagaattgtcccacctgtcgggactcactgtgtggagatcccacctgtccacttgcgtgtgtctcacctttactttatttttaatttttatttttgagatgggatcttactctgtcacccaggctagagcgcagtggcgaaatttcagctcactgcaacctctgcctcctgagttcaagctattgtcatgcctcagcctcccaagtagctgggattacaggcgctcgccaccttgccaggctactttttgtatttttagtagagacatgattttaccacgttggccaggctggtcttgaactcctgacctccattcacctcagcccctcaaagtgctgggattacaggtgtgagccaccgcaccaagcctattttatttttatttttgagacagggccttgctctgtcacccaggctggagcgcagtgccatggcggccatgaacgtagctcactgcagcctccatctccctggctgaaacaatcctcccatttcagcctcccaagtagctggaactacaggtgcacaccgccatgcctggctactttttttttttttttaatttttagtagagataaggactcttgagctcaagagtgtcgaactcctgagctcaaggaatcctcccacctcggcctcctttgggattgcaaacgtgagccactgcaccttgccatttcacctctagacacccttttccttatttccaggtaaagtcagcttccctttggcagtgcctctgtatttgttttctactgctgcctgacaaatcaccacagacttagcagcttaaaacaacacacatcggccgggtgtggtggttcatgcctgtaatcccagtactttaggaggccgagacaagtggatcacctgaggtcaggagtttgagaccagcctggccaacatggtgaaaccgcatctctactaaaaatacaaaaaaaattagccaggcatggtggtgggcacctgtaatcccagttactcaggaggttgaggcaggagaatcgcttgaacccaggaggcggaggttgcagtgagccaagatcacgccattgcactccagcctgggcaacaagagcgaaactccatctcaaaaaaaaaaaaaaaaaaaaacaagcaaacaaacaaaaaacgacacacatgttatctcggtttccctgggtcaggggtcttggaacgggttacctggatccttggcgcagggtctcacaaggctgccatcagggtgttggctggggctgtctgaggctccaggcctcttccaagtgcattcaggtagttgacagaacttagttcctgcagctgtaggtctagggacctcagctcctggaggcacctgtagctccctgccacatggaccccaagggcaggccacagccatgaatgctcactttcttccaggccagcaaaggcctgtttctctgccttcctccacctctaaaccctcctttaagggcttgtctgattaggtcagacccacccaggatcatctgttttttttgttttgtttttgtgtttgtttttttgagacagtctcaccatgtcacccaggctggagtgcaatagcgcagtcatggttcactgcagcctcaacctcctgggctcaagcaatccgcccacctcagcctctcaagtagctgggactacaggcatgcaccaccacacctggctaatttttgtcattttttgtagagacacggtttcaccatgtttcccaggctggtcttgaactcctgaactcaagcgatcctcctgtctctgcctctcaaagtgctgggattacaggcatgagccacaacacccagccataatctcccttttgagtaactcaaaataagctcatcaggagtctaatctcaggagtgatatcccacgtgtccactgatccagcccaccccggaggggagggagttatacagggcatgtccaccaaggggcaggaatcttgagggtcattttggaatcccacttccctcagcccctgtgtagcacagcaccaagggatgccactcagatggtcatctatgtgagtggtgcggcgaccagcctgcacagccaagccggtggtgcttctgtggcttttgtctctctggatcagttggacttctttccttagaagcctcatagaattcactgaatctttcttcctcgtgaccttccttcagatcattcaagctttctccaggcaaaacagctccagcttcttcaaactggcaccatgtgacatgactttagttttaatttttctctttttaaagtttttaaaaataatagagacaaggtgtcactatattgagcaggctggtcttgaactcctgagctcaagtgatcctcctgccttagctgcccaaagggctaggagtacaggcatgagccactgcacccagccaacatgagatgactttatattcagtttctcaacagacccagatgcacagttggtgatgataaaataaaaacttcagctgaattaaatttaagagagtttaattgagcaatgaacaatttgtgaatcgggagcctctcaagccggagtaggctcagagactccagcacaaccacatggtggaagatttatggacaggaaaagggaagtgacttacagaaaatggaagtgatggccaggagtggtggttcactcctgtaatcccagcactttgggaggccgaggcggatggattgcttgaggccagaagtttgagaccagcctggccaacatggtgaaacccctgtctctactaaaaatacaaaaattagccgggcgtggtggtgcacgcctgtaatctcagctattcaggaggctgaggcatgagaatcacttgaacccgggaggcggaggttgcggtgagccgagattgcacctctgcactccagcttcagtgacagagcaagaccctgtctcaaaaaaaaaaaaaaaaaaaaaagaaaatggaagtgaggtacagaaacaatcagattggttacagctcagcgtttgccttatttgaacatggttcaaacagttgactacatttgattggccaaaattcggtgattggcacaagtgtagactacggtctgtttatacctccacttgttttgttttgttttggttttttgagatggagtctcactctatcaccaggctggagtgcagtgccttgatctcagctcacggcaacctcctcctcccagattcaagtgattctcgtgccttggcctcccgagtagctgggactacaggcacccgccaccacgcccagctaatttttgtatttttagtagaaatggggtttcaccatgttggccaggctggtctcgaactcctgacctcaagtgatcctccctccttggcctcctaaagtgctgggattacaggcatgagccaccatgcccacgcaacacctccatttgttatagttcactgtgtacagagaaacctttaagccgaacttaaaatatataaggaggcagttttaggctaatcttgatttaacagtgacaaatactttggcagtgtcacctgttttcttatgtatctatccatcctctttgcccttccttgaaaacattctagtttgtcaacatttcacttaaaatatagtatttattgagtgcttactctttgccagacactgtttgaagcagcatacataatgagattgttcttattgaatttctttttttttttttttttttgagacagggtctcgctctgtcacccgggctggagtgctggagtgcagtggcatgatctccgctcactgcaacctctgcctcccgggttcaagcagttctcaagcctcagtctctcgagtagctgagattacaggcacctgccaccatgcttggctaatttttgtatttttagaagagacagggtttctccatgctggccatgctggtctcaaactccgggcctcaagtgatccacctgcctcagcctcccaaagtgctaggattacaggtgtgagccaccatgcctggcctcattaaatctttttagcaaccctgtgagttgtatcatgccattttactggagaggaaagtcaggcacaaagaagttaagtaactccaccaagatcacacagctcataggtggggagccaaaatttgaacccaggcagtttgagtctaggacctgtgcagttagcccctatgcaatgctccctcccgaagccactctctgtacccagaaggggctgtcctaggaccagggatcattctttcttggcccctctgctttgcattctgtattcttcttagtaaacatcctcattcccatttgctttttagcagctatattatttcattgccttaaattgaactcagagtccctttaaaagatctgtgtttgtcacgtgaactactgaaaacaaggcttcccacatcctcattaaggtaaatgcaataaaaaaagtttttttttttggctaaattttttaatgtggttgcttttggtcattgtttcaaccagaggcccagctcagctttttatgttattgatatggcggcagatttcacatagagcagcatctcatttacaaagaacacagaatgccatgccatggactccagagatggaaaagtcctttgaggctgggcacggtgggtcatgcctgtaatcccaacactttgggaggctgcagtgggagaatggcttgagctcaggagtttgagaccggcccgggcaacatggtgaaaccgtgtttctaacaaaaattacctgggcgtggtggtgtgcgcctgtagtcccacctgcctgggaggctgaggtggaaggattggttgaggctgggatgtctaggctgcagtgagccgaaatcagtgccactgaactccagtctgggccacagagagtgagaccatgtcaaggcaagaaaagaaaaggtcgggcacagtggctcatgcctataatcccagcactttgggaggccgaggtgggtggattgcctgagctcaggagttctagactagcctgggcaacacggtgaaaccctgtctctactaaaatacaaaaaaaattagccgggcgtggtggcgtgcacctgtagtcccagctatttgggaggctggggcaggagaatcacttgaatgtgggaggcagaggttgcagtgagctgagattgtgccattgcactccaacctgggtgaaagagtgactccatcccacaaaaaaaaaaaaaaaaaaaaatgaaaggaaaggaaagggagagaggaaaggtgtgggtggggagagagagagagaagaggagaaagaggagaaagagaaagaaggaaagagagagagaaggaaagagagagagaaggaaagagagagagaggaagaaaagagagaaagaaagaagtctttagaattttaatgaaaggccaggtgtgatggctgatgcctgtaatcccagcactttgggaggctgtggtgggaggatggcttgagcttaggagttcgagaccagcctgggcaacatggtgaaaccccgtttctacaaaaattacctgggcatggtggtgcgtacctgtagtcccagctacctgggacgctcagatgggaggattggttgagcccaggaagtcgaggtggcagtgagccgaaatcagggccactgccctccagcctgggccacagagtgagaccctgtcaaggcaagaaagtcaaggcagagagaaaggaaagaaggaaggaagggagggagggagggagggaaggaaggaagggaggagagagaaagggagaaagaaaagagagaaagaaataagtccttagaatttaatgaaaggccggttgcggtggctcatgcctgtaattccagcacttttggaggcctaggcgggtggatcgcctgaagtcaggagcttgagaccagtctggccaacatggtgaaaccccgacttatttaaaaaaaaaaaaaaaaagaaaagaatcttgctgaaagaagagagaaagaagttcttagaatcttaatgaacaaaaactcaagtttctgaaacaagaaaacaaatgtctcaaatagtctaaagaatacggttttttactagggtgtttagcaattttcttgcagattctgatctatctctatgtgatataataggtgcaaagctcaactgctccactcagcggttatgtgtgggggcctcattttctccagctgtgggattgggaagcaagtcgattccttttttataattttgaaatccaggaaacgccaaaaccgttagctttctttcccatcagtttggcagaaattcactgaggtgaagagacgggaggttatttaaggcctctatttagctcatttaaggtgaatatccacacactttgctgagaaatacgatcagataagaggatgctgccccagctcccatgggacttgtatgtgctttgtattagccttctacaatccacagagctcagattctgaaacacgtctggccctagcggttttggatgaggggtaacacctgtaacacccagaggtggctgagagcagtgaatgagaatccacggacagcactgaaattcacaccttggggaacctctgatgtccctgtatctggccagtagtttctgccacttactgtttagatagacgcagagaaaacaagtagggacacaatttcggtagctggaagggagaacattccttcgccctccaactaagtgactctcctctcgcttctcaaggccaaggaagctctgccgtaaggctaaacgcgacactcagggagcatttggaatcttgccctgtggcctcttgcctctaaagctgcaagaccctttatgtggctctgctgtggaagggaaaggagtagagaaaaactactcaaatgactgcagagatgtagaagctttccttatcagggagagaatgggaagctgcgattgctgtttcctgttactgtagtgaacatttcaaaattatgacataaaaatggtttttgtttctttttttgagatggcggtctcgctctctcacccaggatggaatgcagtagtgtgatcacggctcactgcagcctcaatgtcccaggctcaagtgatcctcctgcctcagcctcctgagtacctggaactacaggtgcatgacaccatacctggctaatttttgtaatttttgtggagatggggtttcaccatgttggccaggctggtcttgaactcttgagctcaagtgacctacccaccttgggtggccaaaaatgttcgtttatgtatttatttatttttgagatgaagtctcgctcttgtcccccaggctggagtgcaatggcgcgatcttggttcacggcaacctccacctccctggttcaagcgattctcttgcctcagcctccccagtagctgggattacaggcgcctgccaccatgcccggctaatttttatatttttagtagagatggggtttcaccatcttggccaggctggtctggaactcttgacctcaggtgatccgcccgcctcagcctcccaaagtgctgggattacaggcgtgagccactgtgcctggcccaaaaatgttttttaatatctgggtttttattgttggtggtggtgttggggtgtttgtttgtttgtttgagacagcatcttactctcttggccagactggagtgcagtggcacaatctcggctcatcgcaacctctgcctccgaggttcaagagattctcctgcctcagcctcctgagtagctgggattacaggagcaagcaccaccaagcccagctaatttttgtatttttactggagacggggtttcaccatgttggccaggctggtctcgaattcttgacctcaagcaatccacccgcctcagtctcccaaagtgttgggattacaggcatgagccaccgcacccagccaatacctgtttttaaactatgcttctatgtagatgggttgtgcttgaaattatttcactagtggggaaacacactaagtaggagagcgacttcacattttatttattttttcagagagaggtgcccaggctggtctcaaactcctggtcccaagcgattcttccccctcagcctcccacagtgttgggattacaggtgtgagccaccgcctgtcacgtgttctttagacagtggtgattgtcccaggacctacttgcctcacagggtgtggtggggatccagtgagggcatctatgcaaagagcttagaacagtgcctggcacatagtaagggctcaggacacattaacaacgaatatggttttagagatcggggtcccagacaaagctatgccagtgctgaaacactgtcgatcggaaccacctaggagcaccttttaaaactctcaaagccaaggccacaccccacaccataaattaagtcacagcctctgggggtggggtctgagcatcagtattttctggaagtttcccaggagttttcaatatgcagccacgtttgggaactgtctggtctagaactttgtgtgcctgaggcctgcgctgggagaactgactttaaaaagacacagacaggcagtcattttgtagctagaggtgaagcagatggcgtgggggcagaagggtgtgggacctgggacccagcagggggctacggctcccacgggccttcgagcctggcaaccactggcacccccactccccccaggctgggatggagccactgtctgcacccgaggaggcctccagagcaggaggcgggagcagcagctctgagcccggcttgggcaccagagggagctcgtggggacgcgccacggctccatccctgcagctggttcaaactggtttgggcagggtgcggcctgggcgggctgcattccaggcctcaggctcgcggctgtccggggcctccccaagggctgcggacctagggcagggagcagcaggggcagggcccccgggcaggagcccagcaccctgagaggctggggagatgtttaaaaactcagtcctctttgtgtaaaatcatttacttggcctcccatgggggtccctgactaaggctggcagcgcggcggagcccctggatagggttattcccagacatcagtgtgcattagaatcgaagcagagcttgttaaatgcggaggcccagtgccccctctcaccaaagatcctgattcagaacgtctggggtgggcttctgggcatccatatttttagcaaaatatttctaaggtacaatcacatattcagaaaaaaaggctagaaacaaaatgattgtcaaccagccaacctggcccagggtatgaatcgctgggacacttgtgaaggacacagagaccccttccccagacctcctctttccccagggaagaggatttgggtaatcagcacttttagctaatatcccaggctttttttttttttttcatatgggcaatttcctttttctttttttattttatttttttgagacagggcctggctctgtcaccgaggctacagtgcagtggaatgatctcggcttactgcagccttgacctctaggctcaagtggtcctctcacctcagcctcccgagtagctgggaccacaggcgtgtgccaccactcctgtctaacttttgtatattttgtagatacaggagtttcgccctgttggccaggctggcctcaaactcctggcctcatgtgatccgaccgcctcggcctcccactcccaaagtgctgggattacaggcgtgagccaccatgccagcctggctttttttttttttttttaaatgagtcattttagacattcatacagttttggtattgctacaaacatcagccgaagaaataaaacattccgaatattgaaatccctctcagccgaacacctgacgtcaggagttcaagaccagcctggccaacatggcaaaaccccgtctctcctaaaaacacaaaaattagtcaggcgtagctgggtgcggtggctcatgcctgtaatcccagcactttgggaggctgaggcgggcagatcacctgaggtcgggagttcgagaccggcctggccaacatggtgaaaccccgtctctactaaaaatgcaaaaattagccaggcgtggtggtgggcacctgtaattccagctacttgggaggctgaggcaggagaatcacttgaaccctggagaaggaggttgcagtgagccgagattgcgccactgcacaccagcccgggctacagagactccgtctcaaaaaaaaaaaaaatattaggcgtagtggcatgtgcttgtaatcccagctacttaggaggctgaggcaggaggatcacttgaacctggaaggtagaggttgcagtgagctgagatcgtgccactgcactccagcctgggcgacagagcgagactctgtctcaaaaaatatatatatattaaatccctcttgggctgggtgcagtgcctcactcctgtaatcccagcactttgggaggccgagactggtgggtcacttgaaaccaggaattggagactggcctggccaacatgttgaaaccctgtctctactaaaaatacaaaaattagccaggcttggtggtgcttgttcctgtaatcccagctactggggaggctgaggtaggagaatcgcttgaacccgggaggcagagcttgcagtgagccgagattgtgccactgcactccagcctgggcaacaaagcaagactctgtcaaaaaacaaaaaaaagaaagaaagaaagaaaagaaaaagaaatccctccctcccatacccctctccagtttcttctcccccgccctaaagtaaccacttttggaacatggggtacgtcgttcccatgcacagctttgtacttttgctccatctgtcggtgtccataaacaatatacagtgtggttctgcgtgttttaaaaactgtgctaatggcacagtgccctacagagccttctgcaacacgacttttcttccttagctttatgtttctgagatttatccaccaggagaagtttgctgtgctcaggtcaatttggtgatctgaggccagtcctgggctctttgtgggagatgcctagccagcaggcaagggcaagggtctgagaccggctcccaggggatggcgaggagggctcagagcatcagggaaatcatgacaatgacgaatggccgagtgtgggctcagtgagttcctataaaacccttaagcacttgaggcccaagtctttgccaagaattttccagaaaatgactggcctgaaggcctggatatttggatagggagaaattagcagtggacagatttggaagtgggaattgtgcagtgatggactacacaaaaggcaggtcaaacatgtgttgtttaggcccctacctagggtggccaactacaatataaattcagatttaatggagaggaaggtgtgggacgtcctatatatttatttgcacccttgataccagcccctcctttttaaaaaacaacaacaacaacaaaagacagagtttcactgtgtcacacaggctggagtgcagtggtgcgatcataactcgcggtagccttgaactcctggcctcaaacaatcctcctgcatctgcctctccagtagctaggactacagttgtgccccaccacatcctgcaattttaatttttttttttcttttagagagatggagtctccttatgtttgcccaagcagctcagcctttttttttttttttttttgtgaggcgatttaacatttaaagaaaagtcagcaggcagggggcgctggcccacgcctgtaatcctagcactttgggaggccgaggcaggtggctcacctgaggtcaggagttcgagagcagcctggccaacatggcgaaaccccgtctctactaaaaaatacaaaaattagaattagtcgggcgtggtgacaggcgcctgtaatcccagctactcgggaggctgagggagggggagaattgcttgaacccggaatgtggaagttacagtgagccgaaatcgcaccactgcactccagcctgggcgacagagcgagactccgtctccaaaaaaaaaaaattaattaattaaaaataaaaataagtcatcaaacgaaaaatcaaaacttcagacttgtcttatacctatttgccttttagtactttcctcattagcactgttggggtgggagatgaggcgcacctcgctctcttcagccccaaggcttgtaaagggtctatctaggccggcctccgagggcatggagggagtgggtgcggttgtgaaatgtagtgcgctcaatagtttcctggtgaagtttattttaaaatccgcaccgaagaggaagacgaggaccgtcacactcggccttccctaaattccaggaccctccgcccgatgcaaactagatgctttagtaggatgggaacgggtggggggcgggcggctttgggcttcctctaagctagcgcctctctaacccggacgcccgttagaatcacccggggagttttagaaactaccgatgcccaagccccactccgaaggattccaacttaatcggcctggtgcgaggcctggcttccgggcttttaaaagcttcccggggattctattttacggccgggtccggggccgggagcctgtactctaccgggattccgatggggaggggtggcttgccccaatagttctcaaatttagctttgggtcaacaatctggttggaaccacctaacaaacatcaaaagatcctgatgcccaggtcttaacccagagacggtgtggtccaggcttgggaaattctaaaagagctccaggtgactgccatctgcaagcgagtttgcaaagcactgatgcccaggtgctgcgggggcgggcgcagcgcgcgccgctcgccactgggtggcgctgcccgctcggcccggcgctcctggagctgcgagccgcgaccgccgggagcgcacctgccccgcctccgccaggcggtccgcggggcatgcagcggaccgggggcggggctccgaggcccgggcgcaaccacgggctcccaggcagcctccgccagccggaccccgtcgccctcctgatgctgctcgtggacgctgatcagccggagcccatgcgcagcggggcgcgcgagctcgcgctcttcctgacccccgagcctggggccgaggtaggggacggggctgtggagttggaggagagggttctcgcggttaggggtccgggctccggaccctcggcttccccggagcatcctctcgctcccggagtggggggcccggggattccccccttcctgaagggtggctgcggggcgccacgcagagatgtgcagcgggtcgtccctgctcgctcctccgggcgacaccgggccccggaggcccaggctcgctttccctccccacccgggtcccccagcatccgccgggtcctcaggcgccgccctttgccaggccggccctgggagaggcggaccccgggacctctgctgccccggctacctccgagcggtgcccgggccgagcggcgcctcaggctgcggctgtgcgggccgcgctgcgctgctgcagctcggagcgaaaacaccacgcctctgtctgcgctttctattttaaaagcaccaagtgaaaagcagatctaaaacgagaccctctaccttccggctggaggcatctgtcgacgctgttgtgaaaaagttatttgtctgagttcactaggagttatttacggtcagaaattcaacccattctctttttaaaccacaaaagcagtacaggagtatttaacataaaggctatgcacccctttctcttttctctcccaccccaattctagttttcttagaaaaccagcattaactgtttggtataaatcattccggacatttaaaatgcatttacaaatgtagatatctgtatctgcctaggcagagtattggctcatgccagtggtcccagcattctgggaggctgaggcaggaggattgcttgggatggggataggggacggggaagagtgaggctgcagtgaggcttgatcatgccactgcactccagcctgggcgacagagtgagacatttaaaaaaaaatctatctcgccaggcctggtggctcacgcttgtaatcccagcactactgggaggccgagacgggtggatcacctgaggtcaggagctcgagaccagcctgaccaacatggtgaaaccccgtctctactaaaaatacaaaaattagccgggtgtgtaatcccagctacttgggaggctgaggcaggaggatcgcttgaacctgggaggcggaggctgcagtgagctgagatcagccattgcattccagcctgggcaacaagagcaaaactccctctcaaaaaaaaaaaccataaaatatctttccatatatatatatatacatatatatgagttttctcttttttctttttctttttctccatatatatatatatatatatatatatatatatatattttttttttttttttttttttttttgagatggagtcttgctctgtcaccaggctggagtgcattggcatgatctcagctcactgcaacctccgcctcccaggttcaaggaattctcctgcctcagcctcccgagtagctgggactacaggcgtgtgccaccatgctcagctaatttttgtatttttcagtagagacggggtttcaccatgttggccaggatgatctctatctcttgacctcgtgatccaccctcctcggcctcccaaagtgttgggattacaggcgtaagccacagcgcccagccatctccacatatttttaaaataatttttgaacagacgtttttaatttttttttttttgacagggtttcactttgtcacccaggctggagtgcagtgacacaatcatagctcaatgtagcctcaacctcctgggctcaagtgatcctcccacctcagcctcccgcatagccaggaccacaggtgcgcaccaccatgtcaggttaacttttaaaacaaagttattttgtggagacgagatctcactatgttgcccaggcgggtcttgaattcctgggcccaagagatcctttggcctcagcctcccaaagtgctgggattataggcatgtaccaccatgcctggcccatctatattagttttaaatgaaacctcacttgctgctgtaatactgtcctgcaacttgcttttctttactcaaaatagcatggaaaaatgtgtggggactactaatgggaaggtatggggcttcgttttggtgtaatgaacatgttctggatgttagatagttgtgttggttgcacaaatttgtgaatatactgaaaactgctgaatcgtacactttgaaagggtgaattttgtggtttgtgaattatatctcaatttaaaaaaatagcatggaggcagggtacagtggcttatgcctgtaattccagcgacttaggaagctgaggtgggaggatcacttgagaccaggagttcaagaccagtctgggcaacgcagggaaacccctgtctctacaaaaaaatgttaaaatataaaaaattaaaaataacacgaacaaaaatttaaaaattaaaaataacatgagcatgtatccataaacactgtccaatagaaatataattggagctacaaatgtgagctacctatgcaattttttttgtttttgagacagagtttcactcttgttgcccaggctggagtgcaatggtgtgatctcggctcaccgcaacctccacctcctgggttcaaacgattctcctgcctcagcctcccgagtagctgggattacaggcatgcgccaccacgcccagcgaattttgtatttttagtagagacagggttcctccatgttggtcaggctggtctcgaactcctagcctcaggtgatctgcccgcctcggcctcccaaagtgctgggattacaggtgtgagccactgtgcgtggccacctacgcaatttttagtgttctaggagccacatgaaaaagaaacaggtggccaggcaccatggctcatacctgtaattccagcattttgggaggccagggcaggcggatcacttgaggccaggagtttgagaccagcctggccaacatggtggaaccctgtctctactaaacatacaaaaattagccagatgtggtggcatgagcctgtaatcccagctacttgggaggctgaggcataagaaacgcttgaacctgggaggtggaggttgcagtgagccgagatcatgccactgcactccagcctgggcaatagagtgagactctgtctcaaaacaaacaaacaaacaaaaaaaacccaaaagaattaaaaaagaaaagaaacaggtgaaattaatttcaatatatttaaaataacagtatatctgggccaggagcaatggcttacgcctgtggtcccagtactttgggaggccaagactggaggatcacttgagcccaaggagttcaagaccagcctgggcaacatagtgaggcccccgtctctagttaataaaaaaataaaaataaaaagcatatccaaaatatttcaacatatgatcactagtacaaagttaatgaaattttacattctgttctttgtcctgagttttcaaaatcaggcttttgatactgaactttcagtccatctcagcttggactgggcacatttgaagtgttcagtagtcccatgagacgcgtggctgccatgttggagagcctaggtctccgtcaccctctgccttcctagtgtcccatgatgaaatagtaattgctcccattcctgagcacatactgtgtggcaccagtttgctaaactgtgttcatggcttatgtcattgtgtcacggcagtgacctggtgactgggatggtgttatgttgattttataggtcagcaaacagaggctctcatggcataaatgacttcatgtggatggaccgtaatttatgaatcattcataaatggttcagggctggtgcgttttgccaggcagggtcctgggggaggctccacgctccccaagcatactttggtctagtgtcccagggactcaggcacagacatttaggttgtctgcgacttttcactgcctttagcatcctgagtgcatttcttgttccttctctcccttactctcagcagcgacatgtcattgtgcccagtggctaagccccagcttcattttgtctctattaggaatagtctttaagagaaactgcgtgtattcatttcattttctcactcagggctgtctttaactcagtcacgggtttgcttatgctcatttgtaagggatttgtaataaagagccccaactccctgtagctccatgcagccataacccactgaaagcacttgttgaagtttatttaccaaaagaaacagaaactgcgccagagcagagtcacatgcagcctccacttttaaagcttaattcattaccagatccccaagctggaacagtttccaggtgggcacatgagcaggaaaaggaaaacctagtttgcgaacagacctggacagcagcctcctcccaaccagcctgtctcccgggggcacttttgccgcttccatggagcagcagaaatctcagtccagccaaccccggccttagggggcctgggcctccctgtgaagtggggcctgcttcattcagcaccttcagcctcggtatgtgccaagtctttcctggagctggggacgccacaggcagtgagacacatgaggcccttcccctgtggcactgccagacaataaacacataacaaggccagacacagtggctcacgcctgtaatcctagcactttgggaggctgaggtgggcggatcctttgtacccaggagttcgagaccagcctgggcaacatggcaaaatcccgtctctacaaaaattagctgggcgtggtggtatgtgcccctggtcccagctactagagaggccgagatgggaagatcacctgggctctgggaggtggaggttgcagtgagctgagatcgcatcactgcactccagcctgggcgacagagtgagacctatctcaaaaaacaaaacaaaatgaaaccgtaacaaaacctctaaactgtaatgaatgttacaaagcacagacatgggcggatgtgagatagggcacctgtgtgtgcatagagactcaggagggtgaatagaaggttattgtctgggtgcagtcatggaggtcttccctgaggcagcattgtcttaggatgagccctgagcctgagtaggagttggctggctgaggagaaaaatatcccaggcagagagaacagttcttgcaaaagccctgggatgggatgaagcagggggtttttgggggatggagagaagagcagctggtgggagggggagcagcaggagatggggcaagtgaaggggcacaagctctgcctggacttcacactgctttccccagatggaggagctgctgaggggcggtgccttgagctgggttggcaggtgagttactgtttccagggcctcgggttttctgttcaactagttccctgccacccctctttctggtttgaacatccctttttttttttttttttttttgagacagccttgttcttgtcacccaggctggagtgcagtggcgcaaactcagctcactgcaacctccgcctcctgggttcaagcgattctcctgcctcagcctcccaagtagctaggattacaggtatgcactaccacgcccggctaatttttgtagttttagtagagacagagtttcgccatgttggccaggctgctctcgaacctgtgacctcaggtgatccacctgcctcggcctcccaaagtgttaggattataggcatgagccaccgcgcctggcgaacttttgatttttctatagtcaggatgagagaaaagagaaatatttctccaaactctgtacctggacaaaagtagaaaaatgtaaattagccaaagatggccttgagtttcaagaaaaatgtgggagaggagttttctttgcagaagctaagaatgttacatccaacttgcaaacacggcacacctgtgggaaacttcctaacatgtcgcatccttttgtgacctgctggtcccctttgggcattcaagtttgggatgctggattagaagtctgtgatggggggccgggcgccatggctcatgcctgtaattctagcactttgggaggccgaggcgggtggatcatttgagggcaggagttcgagaccaggatggccaacatggtgaaaccctgtctctactaaaaatacaaaattagttgtgcgtagtggcaggtgcctgtaatcccaggtagttgtgtggctgaggcaggagaattgcttgaacccgggaggtggaagttgcagtgaggccgagattgtgccactgcactccagcctgggtgacaagagtgagactctgtctcaaaaacaaaaaacaaaaaagtctcttagggggactccagggtatggtctactgtctcaaagatgtagttccaatatttattccttaaattttgttttgagatggggtcttgctatgttgcccaggctggtctcgaattcctgggctcaagcaatctgcccacctcagcctcccaaagtgttggaattacaggcatgagccaccgcacctggcctcttccttaaattgtatggcaaacctgcattgtgccattctgctgtaggcactgggcgagaccagcaagacaggcatggtacctggtgttgcaggtggggaggaagctaagcagactagtgacaaacagagtgactaaatgctgataaatgccacacaggagacacctgaggggtgatagggactgaggggaaggaggatgggaaggaccggagggcaaagatctgacagcagatgcccggccacaggggaaagatgagggaccgggaggtgcctgagtggagggacctcagtgaccacaggggtgtggggggaggtagacagggccacaccagggcctgggtccccagggggggagtctgaattctgttctagggtcatgcatgaaggacaggttctgatttatcgacttgtactaggtgtggtagctcatgcctgtagtcccagcagtttgggaggctgaggtaagaggatcgcttgagtgcagaagtttgaggttgcagtgagctatgagtgccactacactctagcctgggtgacagagcaagaccctgtctcaaaaataataaatgaaaagattcatggccacgtggctgcggtgttagaatgtactggggggaccgcagtggcagcagggagaccagagacggatgctgcgccatccaggtggacaaggactgagctggccgcctccctgcatcagaaccttccggggcatgaggagccaggggcaaggcaggtgctgggagaggcagcttttctcagatgtgcctgactttctacccacaaaacctgcccaggagtggggggagccttcctcagggctctggcagcctctcctcacaggacatggccttgctttaggtgagggtctgcctagagccttggatgaaggtctcccatccggcccagcttcagcgtcacacagaggccttaaaacaaacacgttaggccaggcatgttggcccacgcctgtaatcccagcactttgggaagccgaggcaggtggatcacttgaggttaggagttccagaccagcctggccaacatggtgaaaccccatgtctactaaaaaaatacaaaaattagctgggcatggtggtgggcacctgtaatcccagctacttgggaggctgaggcaggagaatcatttgaacccgggaggcagagtttgtggtgagccgagattgtgccactgcactccagcctgggtgacagagccagactccatctcaaaaaacaaacaaaacaaaacacgttggctggccatggtggctcatgcctgtaatcccaacactttgggaggctgaggcaggcaatcacttgaggccaggagtttgaaaccagcctggccaacatggcaaaacccagtctctacaaaaaatacaaaaattagccagctgtggcggtatgcacctacagtcccagctactcgggaggctggggcatgagaatcgctcgaacccggaatgtggaggttgcagtgagccaagatcgcgccactgcactccagcctgggccacagagcaagattctgtctcaaaaacaaaacacgttcccaaagattagaaatagcccagtgcccatcagtgcgggccagtgccatagcgattcttctgatgagtggagcagtagcggctgcagcgggagtcagcgctgcttttgcccatgcacagcagcgttcagcacagagtgctgagtgagaggtgcaaggggcatgtgtgtgtgctgccgttttctgtaaataaaaacagaaggcaaaaatatgtattttcatgcatctataaacaggagattcaattaaatcagtttctcgggtggggtggggtataggcatggttgggagcactaatatagattatagttctcaaactttacaaactttggcataatttgaggatctttaaaaaatactagctggggtcagatgcagtatctcatgccttcaatcccagcactttgggaggctgaagcgagaggattgcttaagctcaggagatcaagaccagcttgggcaatatagcaagaccatgtctctacaaaataaaataataaattagccaggtgtggtggcacacacctgtagtcccagcttctgagctgtgatcgcaccactgtacttcagccttggggacaaaatgagacagtgagactagactcccaaaaaaaaaaaaaaaaaaagagagagaaaaatactgattgcttgcccccatccctgagtattctgatttaattcatgtgggtgcagcctggccattggaattataaaagctctccaggaggattttaagcctggaagtgacctggtctgattggtctgttggaaaatcactctgggggctggtagaaaatgaattttagggaggatcccatgaagcagagcgtgtgggcctggggatctggatttcttttttttgagatggagtttcgctcttgttgtccaggctggagtataatggcgcgatctcagctcactgcaacctctgcctcccgggttcaagcgattctcctgcttcagcctcccaaatagctgggattacaggcgcctgccaccatacctggctaatttttgtattttcagtagaggcggggtttcaccatgttggccaggctgatctcgaactcctgacctccagtgatctgcccgcctgggcctcccaaagtgctgggattataggtatgagccactgcacccggcctcatgcttttttcactcatgttttggagacctttttatatgaatgcacaggagctacctgattattttcagcagttagacagaatttcattgtttgtctgaatgacactttaggtaaccattcctctgttgacagatatttaagttatgtggaattttttgctgtcacagagtgtcctgcaataaatatctctgcacatacatcattttgcatttatgcaaatatgtaggataaatacctaggaggtgtattactgtgtctgaggacacatgcattttagacaagattgagtgcgtttagggcagtatggccatagacagcacatgcattttaaatgttcgttactgttgccaaattaaccttcctggaagtcagggtctgcatgattttagagcagagtagtcagccccttctggacactcaaacttcaagatcaagcatccttttgggaccaggatgggaactctgtgttgctttggggacctgagaggaacgagttcccgagtttcttctctgggcagtgggtcgttgtttaacctgccaactccttcctggtttgcagttcaaacctaacgctactcagagaatcacctcatttgctccctggcttccgggatctttcaaccttcatttcatcgctttcatcttgtgcatagagatgaggatgattttctgcctgggctgaatggaccttgctatgctaagattcttcagtatttgtgtgtgtgtgtgtgtatttgtttaagcagcattattgagatgtgatttgcatacatataattcacctgtttaaagtgtataatttaatggcttttcgcatgttcacagagttgtacaaccatcaaccacaaccaattttagaacatttttatgaccccaaaaggaaacactgcacccgttatctgtcattccccaacccccaccacgaatctccttcccatctttatagatttgcctgttctggtatttcatgtgtgtttgtgttttaaaaacacagattggccagagacttgaaggccacattcagcccacagacagttttatttggctgtcatagtgttttttaacttatcaggctagttttgaacattttcaaatcgagagaatttgcataaacatctggattgccatttgtcttgaacaaagcagggttggcatatccctacctggcacaagctggggcccagtagcagccagcccatttaaatagggcctggggtctcctgtttgctacagtctccacccctccctgttgtctccctgacctggaggctgaacatcagctgctctttatgaccccacctgcactgctgtttttcttagaagtaaaatctctctgtcaaaagtcggaaactggccaaagcggtggttcatgcctgtaatcccagcactttgggaggccgaggtgggtggatcacctgaggtcagtagttcaagaccagcctggacaacatggcaaaacctcgtctcttctaaaaatacaaaacttagccaggcgtggtggtgtgctcttgtagtcccagctacttaggaggctctgaggtaggaaaattgcttgaacctgggaggcagtgattgcagtgagttgagattgcgccattgcactccagcctgggcgacagagcgagactccatctcaaaaaaaaaaaaaaagtgggaaactgaacataaacagtttgcagaaagcagtattcagcacagcccacttctcttgtatttattacctgcatggcttcggtgtcatttgagtttggagagcctagtagggtccttttaaatggaggtggcatctcactgggagtgacccagagaagcgacttactagacttccttagcttctgtcatgagacagagtctgtggattgtttttctcacaattttcaaatggggagtcagaagcacagagatggtgagaggtgcagttgagaccacacagcataaaatgcaaggctgggactaaggcgccgcccaggctgctgttctcaggccacagctcttccaggcagtacacgtcctccccttcccttctctctctttctccctttcatcttcctttcttttctgcagtgaatattcatgagcactgtattgattaccaatcactggatagcaaactatcccaaaccttagcaacttcaagcatctgccatttcatagggttcatgcatgaactgcattcagctggaggattggccaccctggcagtccagtatggccttgcccatgtgtctagcagttggtgctggctattggctgggacatctcagttctcctccatgtggcctctcaacctctagagcctcgctcactggcctctacagaagagttgcctggacttctttttttcttaaattttattattattattttttaatttttgggggtatatagtaggtatatatattcagggggtacatgagatgttttgatacaggcatgcaaggtgaaatgagcacatcatggagaatgggctgtccatcccctcaagcatttgtcctttgagttacaaacagtccatttatactttttttttttttttttttttttttttgagaccgagtctcactctgttgcccaggctggagtgcagtggcaagatcttgggtcactgcaacctccacctcctgggttcaaataattcttgtgtctcagcctcccaaatagctgggattacaggtgtgcaccaccacacacggctaatttttgtatttttagtagagatggggtttcactatgttggccagactggtcttgaactcctggcctcaggtgatctgcctgcctcggcctccaaaagtgctgggattacaggcgtgagccaccacacccagcccaattacactctttaagttacgttattttctattttttttgagacaggacctcactctgtcacctaggctggagtgcagtggcagaatctttgctcactgcaccctccgcttcctggctcaagcgatcctcccaccccagcctcccaagtagctgggactacaggcatgtgccaccatgcccagctaatttttgtacttttttgtagagatggggtttcaccatgttgcccaggctggtcttgaactcctgacctcaagtgatctgcctgcctcagccttccaaagtgctgggattacaggcatgggccactgcacctggactttacgttattttattttttaattttaataggtttttggggaacaggtggtgtttggttacatgaataagttctttagtgagtggtgatttctgagattttgccgcagcactcatcacctaaatagagtacatggcacccaatgtgcagtcttttacccctcacctacctcccaccctttcccctaagtccccaaagtccattgtattatttttatgcctttgcgtcctcatagcttagctctcacttacgagtgagaacatacgatgtttggttttccatttctgagttacttcgcttagagtaatggtctccatttccatccaggctgctgcaaatgccattatttcatttctttttatggctgagttgtattccatggtatctatatgtatatatgccacatattctttttttttttttttttttcttcagacgggagtctcgctctcttacccaggctggagtgcagtggcgtgatctcggctcactgcaggctccgcctcctgggttcacgcgattctcctgcctcagcctcccgagtagctgggattacaggcgcccgccaccatgcccggctaattttttttttgtattttttaatagagatggggtttcaccatgttagccaggatggtctcgatctcctgacctcgtgatccgcccgccttggcctcccaaagtgctgggattacaggcgtgagccaccgcgcccggctgtgccacatattctttatccacttgttgattgataggcatttgggctggttccatatttttgcaattgctaattgtgctgcagtaaacatgcatgtgcaagtatcttcttcatataatgacttcaagatacccaggagtgggattgctggatcaaatggtagatctacttttagttctttaaggaatctccacactgttttccgtagtgattgtactagtttacatccccactaacagcctaaaagtgtttacattcccactaacagtgtaaaagtgttccttttcatcacatccatgccaacatctgttattttttgattttttgattatagccattcttgcaggagtaaggtggtatcgcattgtggtttggatttgcatttccttgatcattagtgatgttgatcagtttttcatatgtttgttggccacttgtatatcttgttttgagaactgtctattcatgtcctttgctcactttttgatgggattttttttttcttgcttagtattctggatattaatcccttgtcagatgcatagattgtgaagattttctcccactctgtgggttgtctgtttactctgctgattatttcttttgctgtgcagaagctttttagtttaagtcccacctatttatctttgtttttattgcatttgcttttgggttcttggtcataaagtctttgcctaagccaatctctagaagcgtttttccaatgttatcttctagaatttttatggtttcaggtcttagatttaagtgtttgatgcatcttgagttgatttttgtataaggtgagagatgaggatccagtttcattcttctacatgtggctagccaattatcccagcagcatttgttgaatagggtgtcctttctccacttctggtttttgtttactttgtcaaagatcagttggctgtaagtatttgggtttatttctgggtctctgttctgttccattggtctatgtgcctatttttttaattttttttttttaattttttgagacagagtttcactcttgttgctcaggctggagtgcaatggcgcaatctcagctcactgcaacatcaacctcctgggttcaagcaattctcctgcctcagtgtccccaatagctgggattacaggcatgcactaccacggctggctgatttttgtattttagtagagacgtggtttcaccatgttggccaggttagtcttgaactcctgatctcaagcgatccacccgcctcggcctcccaaagtgctgggattacaggtgtgagccaccgcacccagcctttatagtatattttgaaatcaggtaatgtgatgcctccagatttgttctttttgcttagttttgctttggctgtgagggctcttttttggttccatatgaattttaggatttttttttctagttccatgaagaacgatggtggtattttgatgggaattacattgaatttgtagattgcttttggcagtatggtcattttcacaatattgattctacccatccatgagcatgggatatgtttccatttgtttgtgtcgtcagtggtttgtttcatcagtgttttgtagttttctttgtagaagtctttcacctcctgggttaggtatattcctaaatattttattttttgcagctgttgcaaaagaagttgagttcttgatttgattctcagcttggttgcagttggtgtatagcagtctactgatttgtgtacattggtttttatatcctgaaactttgctgaattcatttaccagttgtaggagctttttggaggagtctgtagggttttctaggtatacgatcatgtcatcagcaaacagcaaattttacttcccctttactggtttggatgccctttatttctttctcttgtctgattgctctggctaggacctctaagttattttaaaatgtacaattaagttattattgaatctagttgccctgtgatactgcctgaacttccttatgtggcttctggcttcccggagggtgaatcagaagctttgaggtctctcgaggcctagacctgggagtcacagagccttgctcccatcacatcctattggtctaagcaagtcacaggccagcctagattcgggagtgggaagaattggatcccacctcttcaccggagttgctgcaaggtccttttgcaaaagcatttgtgggatgagagggagttggaaggccaactttgaaacacaagtacctattagttgccagactttgttctaggctctgggaattgaaagacaaataaaagagacaaaaacctgtgtcctccggaggtttcattctggtggggaagatgacaggaaacaagttgagaaaaatagtatgttattttttttgtgttttttttttttttttgagacggagtcgtctcgctctgtcgcccaggctggagtgcagtggcgcgatctcggctcactgcaagctccgcttcctgggttcacgccgttttcctggcgcagcctcccgagtagctgggactacagccgcccgcaacaacgcccggctaattttttgtatttttagtagagacggggtttcaccatgttggccaggatggtctcgatctcctgactttgtgatctgtccgcctcggcccctcaaagtgctgggattacaggtgtgagccaccatgcccggccatgaaaaaaatagttatgttagatggtgataaatgctaaagggaaaagtaaattggggcaggaggaccgggagtaggggagctatagggtcagggaaagcctcacctggaagaaatatttgagcaaaagctagaaggaagtgagagacaactttcaccagtaaagggaacagcaggtgcaaaggccctgcggtgaggctgtgggtggggacgagcaacaggcagtgagatcagggggaggtggaggctccagatggagtagggctggggaggcccccattaggtgttttctgagcaggtagaagatgagggaggactcaaaaaatagaagccaggcatggtggtgcccatctgtagtcccagctactcaagaggctgaggcgggaggatccctgaggcccaggagttggaggctgcagtgagctatggtcccaccactgcactctagcctggatgacagagtgagaccctgtctctaagaaaaaaaaattggtatataattcatgtataaatgtatgattttaaagtatatagtttgttggcttttagtatatttactgtgttgtgcagacatcaccgtgacctaattgcagaacatttctatgacccaaaaaagaaaccccatcaccattagcagttattccctcctctccctgccactccatgcagaggggcaatcacgaatctatttctttctgtctctgtggatttgccgatctctggacgtttcctccctcccttccttttcttttgagatggagtctcgttctctcgccgaggctggagtgcagtggcacgatcttggcttactgcaacctccagctccagagttcaagcgattctcatgcctcagcctcccgagtagttgggactacaggctcatgccaccaggcctggctaacttttgtagttttagtaaagatggggttttgccatgttggccaggctgatctcaaactcctgacctcaagtgatctgcctgcctcagcctcctaaaatgttgggattacaggcatgagccactgtgcccagcctggacatttcttgtaagtggaatcatgtcatgcgtgaccttttgtgcctggcttctctcacttagcatcatgttttcaaggatcatccatgttgtagtgtgtgctggtgctccattactttttatggacaaatgatactctattgtagggatacatcacattttatttgttcattcatcacttaatggatattgggtcgtgtctactttttatttatttattttttttgagatggaatctcactctgttgcccaggctggagtgcagtggcacaatcttggctcgctgcaagctctgcttcctgggttcacgccattctcctgcctcagcctcccgagtagctgggactacaggcgcccactaccacgcccggctaattttttgtattttttagtagagacggggtttcaccgtgttagccaggatggtctcgatctcctgacgttgtgatccgcccccccttggcctcccaaagtactgggattacaggcgtgagctactgcgtctggccttttttttttttttttaaattgagatagagtcttgctctctcgcccaggctggagtgcagtggagcgatcttagctcactgcaaactccacctcctggattccccaagcaattctcgtgcctcagccacccaagtagctgagactacaggcttgtgccactacgtccagctcatttttgtagttttagtagagagggggtttcaccatcttggccaggctggtctcgaactcctgacctcaagtgacctgcctgcctcggcctcccaaagtgttgggattacaggcgtgagccaccacacccaggcttttcaactttttgactgtaatgaatattgtgcaagtttttgtgagagcatatttttcatttcttttttatttatttttattttttatttttttgagacagggtcttgctttgtcatccaggctggagtgcagtggcgccatgatggctcacagcagccttgatcttctgggctcaagtgcttttcccaccccagcctcctaagtagctgggaatacaggcacatgccaccatgtccggctaatttttgtatttttttttgtagagacggtgtctcactatgttgcccaggatggccttgaactcctgggcttaagtgatctgcctgcctcagcctcccaaagtgctgggactaaatgtgtgcgccactgtgcctggtctgttttcatttctttcgggtatattgcttggccataagttgactctgtgttccttttgaggagatgctggactggttttcagagcagctgcacaattgtacccttcccaccagcagtgcgtgaggcttccaattcctccacatcctcgccagccctcatcattttccatttttgtgattgcagccatccctgtgagtgcaaagtggtacagtggaggatttggggtggggagagcttttgtcttaacaggactgcacagagtagattgaagggcagtaagaacaggaagctgggaccagcgagcaggctactgcaagagtcctagcaagagacgacggtgacttgcgccatggtgcttggttgtatgggagagagagtgaagtagttggatttgggtagagacattttgaaggtagaaatgagaagatttgctggcacattggatggggtggaaggtgggagagaagagtcaagggtgctccgaagtatttggcctgaacgagaggatgatggagtttccatttgttgaattagagaagatcatgggtggaggacctttttttttttttttttttttttttgtgccagccccttggtgagcagggccagcccctcttcaatgtttgggcattcccagctgggaagcttgcactgccactttgtgagaagcggggatgtgggaaaaaaaagtgaaaaccatgattcgcaggtgtttgtttaaaaaaaaaaaacccactcaccatctccactggtccttccttgaatgtcacttaaagtgagcctctcgcctccttcccctctgagtggagcagtttatgcccagggggttgcgaagaacagcgagggcattcatctgctcacaggctggttaaaaaggcacgtgggctgcagcctgcgggactctcatttctgaggccacttaggggataatcttgagagaaaattgcccatggatgatttgtgggcatggtgggctggcttatcctgagcgccttcctgttggtcgggaatgtcttgggcttgtttctccctttgctgaccagacagtcagcaaactctcgctttgatccttcctgcttttgggaacctccctagataccagggggtgaggtgggggactgaccatagctgacaagcagcaacaaaggggacacatttctaacttcccccaagagcatcttgtttttgttttgagacaatctcactctgtcacccaggagggcagtggtacatcacagctcactgtagcctcaacctcctgggcccaagtgaccctcccaacctcagcctctcaagtagctgagaccacacaggtgtgcaccaccatgcccagttagttttctttttatagagacaaactttcccactgttgcccaggctaaactggaactcctgggctcaagcgatcctctggcctcagcctcccagcgttgggattacaggcatgagccgctctacccagccccaaagaacatcttgttacacattctagctctggagttagagtgctcagggtcgaattctggcttcaatatttattagctgtgtgagcttgggcaagggacttaacctctctgatcctctgtttctcaatccgtaaaaagagggaaatagtagcacctactgcatagggttcttgtgagaagtaaatgaggtaattcaaatacagtgactagcccttgtttttattctatggcgaaagagattgggtgggtgcagtggctcatgcctataatatcagcactttgggaggctgaggcaggaggattgcatgaggccaggagcttgagaccagcctgggcaacatagtgagacccctgtctctgcaaaaattaaaatacaaaaaaagagagaaagcgagctatggaatgcaaccccttatcacgcacctattgtgtgtcagcactctgttaaatcagttagccacatctatgatgtcaggttaacctcctgaccattctgccaaacgggcctgatggttcctgtcacaggggatccagtggcagtgaaatgcagaggttaagccattgggttccagctgcatggctggcagagggtaaggtgaacccagaagtgccgtgaccacgccgtgcccttcctgagcaggccaggatgggttgcaatgcacttcctacaagcacagtgctgcagaaacatcttgggaaggaggcatcccaccccgctggggcatgggcttccgtggcctcccatgcaggttgtgtgttcttaagcatgtctggacccgtgtctgcgttgtgtgcacctgcactcccaggatctctccatcacccgctgtgccccactcctctctttctctttctctttctttcccctggaccagaaagaacaaccaatcttctcctctaaccacagtgacctcttggctccatcctttctcccttagtgcgataatgacattttctcattgtaatttaattttggggttgggtgggggaatgatctttctttttccccgtcttctctcccctctccccgactgaggcacagaaatagtcccagctgtgagatgaaggttgcagagtttaaaattgcaacttggtactatttatactccagcctgaaagatgtttttttgtgcagtcgtttattttgttgtggtggagatggctcatgctggaagcagcaggaactggtgctgtataaacagttctctggggacaagtgggtggtgagggagccttcaggtgcagggggcagggactaggcctgcccagaaactctgagcacgcctccctggagcaggacggtgtggcctggtagggaaagcagatcatgtgcttggcgaactttcttcctgaatgctggccattacaaaaataacaacagaaactggtattttagaagtcataaaagtagtagataacttgagggggaaaaaaaacctaatttttcttttttgtttttgaagacagatcttgctctgtctcccaggctggagtacagtggcacaatcttggctcaccgcaacctcctccttctgggttcaagcagtcctcctgcctcagcctcctgagtagctgggactacagacgcgtgccaccacgtctggttaaattttgtatttttagtagagacggggtttcgccatgttggtcaggctggtctcgaactcctgacctcaggtgatctgcccaccttggcctcccaaagtgttgggattacaggcgtgagccactacgcctggccaaaccgctaattatttccctaatttttacacaagtgcatgaagcagttgtacactggcaggccctctgcacgttcgttattggcttaatttgtgaagcattaaagggttttttaaatgtgttccaatgtttaaacattggggcatttcctatcaaattaggatttctggcttctcttggaaaatggaaagatctggcagctccgggcctgcatttcctgatggcagctagtggccagcagctggaggactggatgagcacctctcagatcacaagcctgatggcctgtttcactcatttatgttaatgtccagcctgatgactgggttttatttcttcttctttttttaaagacaagttctcactctgtcgcccagcctggagtgcagtggtgcgatcactgcttactgcagcctcagcctcctgggtagctgggactacagacatgcaccaccatgcctggctaatttttttttttttttttttttttttttttttgagacggaatctcgctctgtcgcccaggctggagtgcagtggtgtgaccttggctcactgcagcctccgcctcccgggttcaagcgattctcttgcctcagcctactgagtagctgggactacaggtgtgtgccaccacacccggctaatttttgtatttttagtagagatggggtcaccacattgtccagaatggtgtcgatctcctgacctcgtgatctgcccgcctcagcctcccaaagtgctgggattacaggcgtgagccagtgcacctgggctaatttttttttttttttaaagggatggagtctcaccatgttgcccagactggtctcgaattcctggacttaagtgatcttcctgcctcggcctcccaaaatgttgggattacaggcataagccactgctcccggccatggaccctttacataacataaaaaattcaagtttcccttgtcagagtccctttcccaactcctcctgcccagggctaagtaagccctgttaatagggtttccaaagaaactatgggatgcccggttgaatttgaatttcagataaacaacaaattttttaagtataagcacatctcttaactattagcagtctggcacatatcattccaggcctttctctgtgaagacatgtacttttttttgagacggagtctcgctctgttgcccaggctagagtgcagtggtgcaatcttggctcactgcagcctccgcctcctaggttcaagcgattctcctgcctcagcctcggagtagctgtgactacaggcacacgccaccatgcccggctaatttttgtattttgagtagagacggggttctgccatgttggtcaggctggtctcaaactcctgacctcaggtgatccgcccgcctcacacattttttttggtatggtttgtatctgacaccgtctgcagcttgcttttcctctccggggtatcaccggggccactgtgtttattagagcaggctgtgaggttgtggactccatctggattaggatccttgccccgctgtttgttaactgtgtgatcttgagcaggttaccccacctctctgagcctccgtgtcctcatctgtacaacgtggaggatacgggtagctttgttatttcctgtatttgttgatcttgtctcttttgaaagctgcatagaatggagaggccgtggtggctttaaccagtcctccgtgatgggcgccaggactgctgcctgtttattgctctttcaaaggaggcagtggaagggggtcgagcaggaaccgggcacataatcctaagacttagtttgctttaaaaaaaaaaaaaaaatgaagggtgtttgtctccctggaaaccacttgctaatctccaggatatcgtctctttttcaggcgaaggaggtggaggagaccatcgagggcatgctcctcaggctggaagagttttgcagcctggctgacctggtgagtggctgcctggaaggcgtgggtttaggcccaggccagacttcaggcccttgctggagttttctgcggaagccattttggtggtgagttagcaaccaggaggaatggggcagcggccagcgctgagaggaaagccacgtgcaaacactccctcctctctctctctctcgctctctctctctcactcaaccccaagtgcttcctgaggcggccatcttgatctcgtccttccctcgagatggtttttattccgcagaggagccaggagtggaccacaaggtggcactctcgggcaccgatgcagggagccgttcagcggggacgctagactatatttaactttcctcagctctgcaccgtcccctgtgcaaacatggagacagccaggaaatggcttcaggcctgcgaggcctaggaggagcctcttgcccaggccacagcccgtggtggagttgggcatcgagttccttcctgaatccttctgttctctctgcttttacctcctactctgtctggttggcccaaatctactagcctggctgaggaggaagatggaagacaatggcccagaagacaaagcctcccacgccagagtctctagaaatcgcctctagaggctgggtgcagtggctcacacctgtaatcccagcactttgggaggccaaagcgggcagatcacttgaggtcaggagttcaagaccagcctgaccaacatggtgaaaccctgcctctaccaaaaatacaaaaattagccgggtgtggtggcaggcgcctgtaatcttagctactcaggaggctgaggcaggagaattgcttgaacccggaaggtggaggttgcagtgagctgagattgcgccactgcactccagcctgggtgatagatcaagattgtgtctcaaaaaaaaaagaaaagaaaaagaaattgcttctagatcccagtgttcctaggattgctgccagccaggtgtggagcccccaggagtgctgatagaattttctagaagctcccaagcttattagaggcaaaccagtaacctgggcttgaggtgtctgcctggaggcccaaagggtagagctccatattgtgaccaggccctgtgtctccccagagtggaggaagcctggccacctgggcccagtggtgtgcgtttatgtccctgagaagcaccgtgtccggaccctgagagtgtttgtgagaacccaagggagtaacagtaacagcagccccagatgttcattgaacgcctttctttgtgcccggcacaaagccaccctagacagcaggcactgagtcatccctacctattcagcggacctcggcccagcctctagggtcacagcagaaatcccaagaggacctatatggtttcttctcttgagtcaatttttacgttcagatgtgggtccaggtgggagctaggtaacaagacaggcttttaacagcctggattgtcctttctttaccaccacgcattggactctttctttctctttctgtctttgtctttctgtctttccgtctttctgtctttccgtctttccctccgtccctcccttccttccttcctttcttccttcctttcgagatagagtctcgctctgtcccccaggctggagtgccgtgatgcaatctcggctcactgcaacctctgcctcccgggttcaagtgattctcctgcctcagcctcctgagtagctgggattacaagcatgcaccaccatgcctggctaatttttgtatttttagtagagacagcatgttgaccaggctggtcttgaactgctggccttaagtgatcctcccgcctcggcctcccaaagtgctgggattgattataggcgtgagccaccatgcccggctgcattgggcactttctcatgaatgggccccgtcataaacttgagtatgcaaagagagttcagtccatctccattcccatcaagccccagtgtatgtggggagactgatttgggtatcagttggtgccgtcccatgctacagtgctgttgtcaaggtaaggtcaaggtgtgaagggattccagagccaggggtgctaagtcctgcctaggaaattgggaaggcttcgtataacaggtggtgatgaatctggggctgtaaggagaaatagagaattcaacagatggggaaggagtgcattcaggcagagggaccagcctgtgcaaaggcggggaggccagggatgtggtatggctgggcactgggtgaaggatcgtggttgcgggcagggaaggcaggtcgggaggatggtgtggatggatgctccagggacacctttgttttcaaatcccatcccgtcatccacatgggcattctgcgcaaggagacccagcatcagcctgaagagggctgggggcagaagtccatgtggacaggcggagagacccatgtggcccagccctgaaaaaccatcacagcttcctgtggtgggaagtgtgtgtgtctgtgttgccaggagactcaagattgcaggcagcatcaggcaggtcctcctaactcgaagcctggagatgcttcatggaaagatttaatcctgaggccacacacagatgacccacaggtccaatcctgcctgcagataatttgatgtttctgggggggaaaaaagcaggcattagcttgtgacatttttagaatttcatgtgaaaaatctagagttccggcttctctcagaaaagcaaagatctggccctcctggggtactcattcctaccttgcaagcatcggccgccatgtcacgtggcaagcaagcgaccacctgctgtgggcagcaagcgtgctttccagcttgatacagtgctggctgctcccggggagccttcctgactccacagccgccacgtgcttgtgtatttttgatagatgatgtttctctgttcttttgaccctactgaaagtgggaaagtaaagccagaccaagaggatcccatgttccaagaaatggaagagaacatgcatccttttggaagcaaagactcttcccatgtgtctgtgttgacagaatgtgcccagccagttctgcaaatatgtgacgcttgtgggacccctgggggtgtttgagcttacagcccctgcatgggcacgctgtgccaatgccatttatattctagaaatcctcttggcccctagaggttcatgcttggcttacctggtatgtctgctgtgtgctgtggggctacatgactacagagagaggtgtccggtgatcagccctagcttggggcctcttttttctctttaagagctgctttgaaatccaagttagggatgagtagggtcctctaggagcaggtgatgtcacaccacggaccactgtccccccaggtccctgcctcggtcttcagaaacactgtttgatcaatttacaggtccgagagaaggcaggccctgggctgcacggtttagagagaagccacttcctttcagataaaattaggctgttagaaatcaaagtccagcttcccgtctgctctattagttcttccattagcctgtcttgatcactctctgtcactgaaattcacccctctgttctgggacctcttttaacatttgatataatgccaattgttggcacttcactttctgattccttctactgtggggccatggacatgtcacgttacctctcagaacatttattttttcctccgtaaaatgaaaataatggttctgattatctattgctgtgtcaaactacccgaaaatttggtgatgtaaaacaaccacccatttattttgtgggctagagcagggcacagaggactcagctcatttgagtcgaagctggctccttcatcacttgtctggtacctgggctgggctggttggggctggttggggctggttggtgtaacttgccccgtgcacgctctccacgtggctggcgtgggcttcctcgtagcatggctgtttgacctccccagagcaagcagtccagtgggcaggaaggaagctgccacatgtcttgaggcctaagtatggaaactgacacagtgtcacttctgttgtagtttattggtcaaagcagttacacagcccagccagaatcaggggagagaaactgtattctaccccttcatggaaggaattaaggagtttgtagctgtccttaatccactacaaatagtttccatctccaaagagttactgtaaggaatagatgaggcagagatgtgtgctttacacccactagaatggctagatcttaaaaaccaccaaaataccaagtgttggcaaggatgtagagcaacgaagctctcatacattgctggtagaaatgcaaaaaaaactacagccactttggaaaacagcttggcagtttcttacaggttttttttttttttttggagacacagtctcactctgttgcccaggctgtagtgcagtggcgctatctcagctcattgcaacctctgcctcctgggttcaagcgattctcgtgccccagcagctgggattacaggtgcccaccaccacgcctggctaatttttgtatttttagtagagatggggtttcaccatgttggccaggctggtctcgaactcctgacctcaagtgatccacccgcctcagccatccaaagtgctggggattacaggcgtgagccactgcacccagcctcttacaaagttgaacatgtgcttaacccacatcccagcaattctagtccttgtcattaccgataaggaatgaaaacaagtgcccaaaccacacaaaaattcacacacaaatgttcatagaagccttattcgccaggcgtggtagctcacgcctgtaatcccagcactttgggaggccgaggcgggtggatcacctgaggtcaggagtttgagaccagcctggccaacatggcgaaaccctgtctctactaaaaatacaaaaattagttgggtgcggtggcatacacctgtagtaccagctacttgggaagctgaggcaggagaatcacttgaacccgggaggcggaagttgcagtgagctgagattgcatcactgcactccagcctcggtgacagagtgagactccgtccccccggcccaaaaaaaaaagaaggcttattcatgatactccaaactggaaacaacccaaatgtccgtcagcagtagaatgagtaaagcaattattgatttatgcatatattggaatactacacagcaatgaaaaagaatcgactgctatacacagcaacatagatgatctcacacatatgatattgaacgaaagaagtcatggccaggcatgatggctcacacctgtaattccagctctctgagaggacaaagtgggagggttgcttgagctcaggagtttgagaccagcctgggcaacatagggagaccccatctttatttttaaataataataatacatttaaaaagaaaagcttgacacaagaatacattctgtgcgattccactagtctgaagttcaggaataggcagaagtaatctatgggtggtataagtcaggtagtggttggtttggggagggtagtcatggcctacaggaggccttatggggtgatgaaatattctatatcttagtctgggtggtggttacacagatgtaaacatatgtgcggattcatcaagctgtccacttacgagctgtgaactttcctttgtgtcacttacacccagttaaagatcgttgctgagcacagtgctatttattaataatttttattataatattataataaatagcacagtgctatttattaaatgactaacaaatggcagctactaatgccatcatcattgttaccaaagcaccagaggggcatgacactgatgaagttatccacagtaaggctggatttgtaaagcctttcagctcagtgccctctggggtttgggtagcttgtccagtccctctgaaactccagtggccttcggcccaccttctgccaaggagcagagtcttacttcgctcacataaatggagaacatttcctgttggccttggcccagcagttgcatttggcgtgggtgcatgttcttgggtcaaatgcctttggctctccttcctaggggcctgaatcattctggacagatgactttcctctgtggtgacctcagaacctgctgcccagacttctgggttctggagaccaggtctggagaggtgggaggatagttgggggaagggtctggggcctccaggctagcacacctggttgggtgtttgtcctgggagaggctctagagcatggaggctttttcactgaaatctgtttgctcttctcagagcgtagcccaaggcgtgcaaatgtaaacacctgtaatgtaatgagaagtgagttggagatgagaaatgtgtcactttccttttgagtcctccataagaagaaagtgctcctctgggtagctatggattccatgttggggagactgtagggagtgatggggactggggttaacaaaagtggcagctgccactcagctccagctgattgttgccatgtggaacatgggctcagtgtggccaggtcttggctcagtgtgtccaggtctcctgatttttcacaagaagtcagagatctgggtttctaagggaaatatcctgactttgatatcttggcatctggtttggttttactttttttgttttttttaggcatgattgggctgacactgcctttgcccgatgaatgacatctgtagacctctggtgttaggaagggtggtctcaggcccatctggattagactcctccctctcccactttttagctttgtgaccttgggccagctcatttagtttctctgagcctcggttttatctcccataaaataaggttgaagaggaaatagttcttgcctcacagggcctgttcccagcacatggtgagagttcatggagtgtgctctgttggtatcgtgcccctctagactggacctacattaaccctacagttctgttttttcctttaataaatttttaatttttaaaatagagatggtgcctcactgtgttgcccagactggtcttgaactcctggcctcaagtgaccctctcacctcggcctctcaaagaattgggattacaggtgtgagccaccgcacctggccctaaagtttcttttatggttcccagcccagggtggaaccaagaggtaaggtttggggcctttcagcccctaggattgccttccctggcccctcattctgagtaactacggtaaacctctgggcagatataaacagttccctgttgccttcagtttcagccattggagaagctgcatcagagaagggatttctctaaaaataaaataagaaacaggctaggagcagtggctcatgcctgtaattccagcactttgggaagccaaggtgggaggatcacttgaggtcaggagttcaagaccagcctggccaacatggtgaaaccccatctctactaaaaatacaaaaattagccaggcatggtggcaggtgcttgtaatcccagctactcgggaggctgaggcaagagaatcacttgaacctaggaggcagaggttgcagtgagcagagatggtgccactgtactccagcctgggagagagagtgagacttgtctcaaaaaaacaagaacaaaaacaaaactaaataaacaaaaataagggggaaaaaaagagacttctttattcccaattctttgggatttagggggcgagggtggtccttgagtctcctttctaccactttctctgtctgctgtaggttgccaatcccagcccatacccccaagctcattctcactcccccgatttgtttctttagaaattaacagaaggatacgattcaagtttgttccccggtgctctgaccttgccctggaattaattatctgctctttgctacatcagggtgattttctccaagtttagccttgttgaggaatgagcttctctctagaaatctggccttggggaagaaagggaggagactgaggacctttccctgtcactggtaacaaatgctggagccaggcagagcgtggagctggggtgagacaatggggaggggtgatgactgtggaaaccccagtgatcaggcccatctggagggagcagtcccagcctttgctgcccggggagactcaggcccatcattgccaaagctgctgacttaagagaagctgtagatccagacctaattacttgaatttttaaaaccatatttatgtattttttattttggaatagtttagatttacaggaaaattgcaaagattgttcagagagttgccatattaaccctaaagtttttttaaatacatttttaattttttaatagagatggtgcctcgctatgttgcccaggctggtcttgagctcctggcctccattgttaacatctcacatcaccatggtacatttgtcagtactaaggggccaggcacaatggctgacgcctgtaaacccagcactttggattgaggcaggaggatagcttgaggccaggagtccaagaccagcctggacatcacagtgaaaccctgtctctacaaaagataaacaattagctgggcatggtggtggacagctgtagtcccagctattcaagaggctgaggctggagaattgtttgagcccaggaggtcgaggctgcaacaagtcatgatcacaccactgcactccagcctgggtgacaaagcaagaccctataaaaaaacaaaaaaacaaaaaacaacccacgaccccccaccaaaaacaaacaaacaaacaaacaaaaaaaacgaagaaaccagcattggtatgttgctattcactgaactccacgctttgttttgatgtcaccagtttctcatgagtgtcctctttctgttccaggatccagtctaaggtgccacatggcacgaggttgtcacatctccttagtctattccggtctgtgacagtttcagtcttaccttgcttttcatcacttgtgcagttttgagacatgctggtcaggtgtttcgtagaaggtccctcgatttttgtgatgtttttcatgtggttagactggagataggaatttatggaacgatcaccacagaggaggagccttcttatcacatcccatcagagggtccccgatgcccacatggcatcacggatgtgagcctgcataaggtggtgcctgcggctttctccagtggaatttgccatttccccctttccagacccattcaatcctctgcacatattaggtttgtgcacatttactttgtacttggagctttgatctaatactatgttaattttttgttgctcagcttgtcccagctttggccatttcactcttgcaggttggcttctgtgtcccttgggtaagccccatctcatcctttattttgtggaacactttcttgctttctggtgctacaagatgctccagactcagctcagtcctagaaccagccatttctcatgggagccccacttgaatttttatttgttttagagacagggtcttgcactgtcgcccgggctggagtgcagtggcgccatcttggctcactgcaacctctgtttaccgggtttaagcgattctcctgcctcagcctcccgagtagctgggactacaggcgcacgccaccatgcccagctaacttttgtatttttagtagagacagggtttctccattttggctgtggctagtcttgaactcctcacctcaggtgatctgcccaccttggcctcccgaactgctgggattacaggtgtaagccactgtgcccggccttcaaaaattttttttttttttcaaaatatgagatgaggaaaccgaggcccagggaggctaggggaccagcctggtgtcatagtggagaacagtggagcaggggcttaggctgggcagcctgacaccacatgccaccctctcagggccgatttttgaccttgtgggatcagagcgtgaaaaacgagtatccctgaggacactggacacctagagctaggtgcccagagagatggcagtgctgtgaccagaggagggctaggcgtggggagaggcatggaggagtttggttttagacgtacagggcaatggggcaaaggtctcgggaaaccgagggcaagggggaaatgttatcctgaacagtggtgggagcagattttcacgataaccacaagaagtctgatgtacttaggcagaaagaggaggaaaaacaggtatagttttcaaaaaaaaattttaaataaaaatctggggccaggagtgctgactcatgcctgtaatcccagatctttgggaggccaaggcaggtggatcacttgaggtcaggagttcaagaccaacctggccaacgtggtgaaaccccgtctctactaaaatacaaaaactacgcaggcatggtggtgcgtgcctgtggtcccagctactcgggaggctgaggcaggagaatcgcctggacctgggaggcggaggttacagtgagctgagattgtgccactgcactccagcctgggcaacagagccagattcagtctcaaaaaacaaacaaaagtgagtcactaggctcagcccaaaatcttggggaggggattacatgagggtgaggataccaggagggtgagaccacggggggcacatcagaagccgcctccacactccacgccagcattgtgctaaacagctcatcctcagtatcccagcgaaagaaggaccatcgtcttgcaccactgtcccagtgagcaaaggagggctcagagaggtgcagtgagttgcccaaggtcacagagctcatggtgggtagagctaaatttaaacactagcctgactccttagtccagctcctgctgtgcccactggtgtttctctaacagtggtccccagattcctattccaacgttgcctcagactgttggctgaaagtgcggattctcaaactaggagaggctgggaatcagcatttgaaaggcttcccccaggagattcagttgctccccagaattttattttttttcttttttgagatggagtttcactctgtcacccaggctggagtgcaatggcttgatcttggctcactgcaacctccgcctcccgggttcaagcgattctgctgcctcagcctcccgagtagctgagattagaggtgtgtgctaccacacccagctaatgtttgtatttttagtagagacggggtttcaccatgttggccaggctggtctcgaactcctgacctcaggtgatccacctacctcggcctcccaaagtattgggattacaggcgtgagccaccacgcccagccgctccccagaatttgagagccatgaatatgtggccttttttgcacagcgaggatatgataacatgaaaatggaatctctcgttctctctcacacacacagaagagttaggcttggtccttgggttctgaaggaaaaaggaaccatcagcgtctgatatcagtgatcaagggaaaaatatgtggcttcatacagttcacttttggggcccttgccaagcagaagaaaatgaaaactaaaggagatggtgcaaggaagtacttaggacagtgcctgcgtgtcggaagcatctgatacataagagttgtggctttcattaacattattaatgaatattattcgtaatgatcaacttgttaatattaattccaatgcaatgaaaactggactgactttgactttggtttagagaagagattctgattctttccattcgctccagttcagtggtttagaaaatgaagatatttagtttgggactggtgttgctgggtggttggtgggaagtgattaatttgtggttcagtacataatacctgggtaggtctgggtccacagaggcgacgatgttggtcctcccctggggctctgagttgttcttgggcctgtattgcgcaggatgccacctggcacctcagccatcattggggtctgtgtagaccctggccaacctctgaggcaggcaggaggacacagtgatggggcagaaggcctgatgagctgttttgttccttgcagatcaggagtgatacttcacagatcctggaggaaaacatcccagtccttaaggccaaactgacagaaatgcgtggcatctatgccaaagtggaccggctagaggtacgtctaggcaaacgaaggttctgaggctgtggacttgatcttgcttttgccttttccgcaaagacgccgatctggccttgagcatgtcaggcattatgcccaatgcagggggttggtggtgggagttggggagtctgcactcaagtgatatttcaaaaaaatcacaagtaaaaatttgtttccaggccaggtgcagtggctcatgcctgtaatcccagcattttgggaagccaatgtgggaggatcacttgagcccaggagtttgagaccagcctgggcaacatggcgaaaccccatctctacaaaaaatacaaaaactagtcaggtgttgtggtgcatgcctctagtcccagctacttgggaggctgaggtaggaggatggcttgagtccaggaggtcatggctactgtgagcattgattgtgccactgtattccagcctgggcgacagagcaagatcctgtctcaaaacgaaaaaaaagaatttgtttccaacatttaaaaatcagggtactttatataaaaatctgcattttaagcttttgaaaattcagaagctttgataaccctgggcccacatttccttaaatactttaatctgtttatgtttcaaggcataaatatacaatgtatacacgcctaagtatgtaatttagtgaatttttacatatatcgacatcatgtgatgatgacccaaattgagagagagaacatttccagcccctgggttgcattcttgcagtgttcttgcaagaatggatggaggctgggcgcagtggctcacacctgtaatcccagcactttgggaggctgaggcgggtggatcaatggaggccaagagttcgaaaccaccctggccaacctggtgaaaccctgtccctactaaaaatactaaaatcaaccgggcgtggtgacacacactgaggaggctgaggcacaagaatcacttgaacctgggaggcagaggttgcagtgagccaagattgcaccactgcactccagcctgggcaacagagcaagactctgtctcaaaaaagaaaaaaaaatgggtggagctggtggctgctgctcctcagaagggcgtgggctctccagtcttccacagtccccaccatgccctgttgccttaccgctgacgtagctcacccatcttttacttgcctggctaagatgcatggcatctcatttcctccttgttgcactgcagtcagtcccctcactgcccccatctcctggaagaggagcataagctttgcaaggtcagccacttctctggggtcacactagttacatcaagacaggactccagctcatatgtgccagtgcagacactcttcatccacctggggccctgggcttgggaccctggctccttgcacagcagaggacccggaggctgagaggagcttgcggttgtgtcatagtcacctggccagagggaacgtgagcccctcccaagctgcagagggagggagcaggcgtggctgtcagcaccgaggtagcagagaattaacattcttgtcagcagagaatgaagcaggaatataattaaaactttgcccttggaatagctgattcatttgaattttattccacacgtttgaaagaggaaagaaaatgtgaagacttgcagcctggttctcgcctggcctgggctggcccagctgtcaggcccggttcctttctgagcattcagtccactgatgttgactgagggccaggagagaccctcagcagggtattaccatatcagcctcctatcgctgctgggagaaattaccatgaattcagtggcttaaaacaacacacgagcctctctgagcctaccctggctcaggacgctgcccaattttaaaaaaagaagaaaagaaaacaacacactttttttttttttagatggagtcttgctctgtcccccaggctagagtgcagtggcatgatctcggctctctgcaacctccgcctcccgggttcaagtgattctcctgcctcagcctcccaagtagctgggattataggtgctttccaccacgtccagctaatttttgtatttttcgtagagacagggttttgccatattgtctaggctgctctcgaactcccgacctcaagagatctgcccgcctcagcctcccaaagtgctgggattacaggcatgagccaccacactcatccacaacacacatttattatcttatagttctggaagtcagaagctcaaaatgtgccttatggggctaaagtcaaggtggtggcaggttggcccgttctggaggctctggggagaatctttgcctttctttgcctcttttcttgccttttccagattctagcactgcctgcattcctcagctcgtggcccctgcctcctccttcaaagcccacggagtgacatcttcctgtctctctgttgctggccctcctgcctccctcttgtaaggacccttgagattacgttgggcctacctggatgattcacagtgacctcccattccaagatccttaacttaatcacacctgcaggatcccttttgccaaggaaggtgacatattcacaggttctgggactaggacatgaacatctttgggagccatcgttctgctgcccacacttctccaggatttgctttcattaggcaagtgctgtgaagggaagtagcgacggaggtatgggatctacaggaccttggagaatgagtggaaggaactgtgttaggtgggtgggggaactgtgggaaccgtgttaggtgggtgcagctcaggcaggggctccaggcaggatcttggctctgagcaaggaggagattgggatgttggaaggatcctgggaagccaggtattgggggcaaaggggactcggaccccagtggggccgaagaaactggcagcagcagccaggttgtccaacccttgccatccaaggtcaggactttggcctttatcctgaggaggaggaagccgccgaagagtcaggacagcctagtggttaggggcacacaccccagagccaggcttctcagctccagtgctgctgacctggaaaattctttgttgtggggctgttctgggcattgtaagttgcttagcagcctctctggcctccactcacaagatactattagcatccctccaaccccactccccagcgtgacaaccaaacatgttgccaaatgtcccctggggggcaagattgccgcgtttcaaagcgctgatctagagctgcatagcctgggttcaagtcctagtgctgctgcctcctagtgtgtgacctccagaaaattctgagcctcatttccctgtaaaatgggagttacggtggtgaggttcttacacccaaatccttgtcgtattcaacaaacgtttgctgcactgtaggctgccctgagatgggtgctgggcatatggccgaggggagatgtcggcttccctgcaggtggtcctggaggagcattagacagggaagcaggccgggtggggtgggtcagccgcaagagcacacaccaaggggtcctggccagagctggaacagagggggcttcccaagtgtgtgacctggaacctaaggcctgagatttggtgcaggaatcctggggagggagcagcttgtgcaaagaaaggtccagaggcgggaaaaggcagcttctcaggcacctggggcctgggaggagctcaaggtcaggaatgagacggagtgaggggtgtagcccatagggtagggccgaggcctggagtgtggaccctgttcttagaatgacaggacccatcagagggattgcagctgctgtaacccccgctccccacaaagaagaaagtctacattgattattctttttttgattcattcattcattcattcattgtagagaccggggctcactaagttgctgcccaggctggtctcgaactcttctttttttttttttttttttttgagactgagtctcactctgttgcccaggctggagtgcagtggcggaatcttggctcactgcaacctctgcctcccaggttcgagcgattctcctgcctcagcctcccgagtagctgggattacaggaaggcccaccacacctggctgatttttgtatttttaatagagacagggtttcaccatgttggccaggctggtctcgaactcctgacctcaagtgatctacctgccttggcctcccaaagtgctgggattacaggcatgagccaccacgtccagcagattattcttaaagtataccatttggaggtgtggggtatatttactaggtgatacaataataagcactatctcattcctgaacgttttcccaaaagataccacatgtctattagcaaccattccccagcccccggctctggcaaccactcatctactttctgtctctggatttgcctgtgctggacatttcatgctaatggaatcataccatatatggccttctgtgtttggcttctttcacttgccataatggtttcaaggttcatctatgttgtagcatgtgccaagacctcattccttctgtggttgagtcatcttttggtatatggctggaccatacttcatttgtccatgcattagctggcgcacagttgggtgcttttcactttacggctgtcgtaaacaatgctgctatgaacgtttgcgtacaagtttttgtgtaacatatgttttcatttcttttgggtagatacctaggagtggaattattggcagatctttttaggagagctatggaaactcgttttaggaagtttctaacaattttccaaagtgactacaccattttgaactcaactcgttttaggacgtttcaaacagttttccaaagtgactacactattttgaactcccacccgcaactactataattttttttttttttttttgagatggagtcttgctgtgtctccaggctggagtgcagtggtgcagtctcggctcactgcaacctctgcctcccgggttcaagtgattctcctgcctcagcctcccaagtagctgggactataggcgcctgccaccacacccggctaattttttgtatttttattagagacggggtttcaccatgttggccaggatggtcgtgatctcttgaccttgtgatccacccgcctcggcctcctaaagtgctgggattacaggcgtgagccaccatgcctggcctactataagttttagatagagattgcaaactcagatgccaacaggagccaggactgctgagggaccaggtgttagaagaccaaccccaagctctccccattcctttctgggagcagctggagctcagaagcaactgtcaccaccgtggggcgtgaatctcccggctgtcacagaccttactctgccctagagtctcaccaacattgaggctgagtggcactcacctcctgtcaacacccctgcacgtctgctttccttagagtagagagagatttctctgtaactgatgctccattaaaaggggggagtcctaagtgaggtcccaagagggccatggattttaagatcaagtgggagatgatgtatttcttttcttttctttttttttttcggagacagagtatcgctctgtcgcccaggctggagtgcaatggcgcgatctcggctcactgcaacctctgcctcccacgttcaagtgattctcctgcctcagcctcctgagtagctgggattacaggcgcgtgccaccacacatggctaacttttgtagttttagtagagacggagtttcaccatgttagtcaggctggtcccgaactcctgacctcgtgatctgcccgcttcagcctcccaaagtggtgggattaccggcgtgagccactgcgcctggctggtgatgtatttcctattagctcaagtgtgtgacatcaaacaataaaactgagggacctgctgagaacctgacattgtatggggcaggtggactccagagccagagagctggggctctgatctgcccctttggtaattcaccaacccccttagagtcagtttcaaggaagacccccatctccaggaaaggaatgtgccatctacccctcagagtcattgtgaggattaaatgagacccgcacctgccatcttgcagatgctcagcaaggacaaactattatggtggttgtagttgtccacaaggctgagagagggataatttgtccaggatggacagtcactgttctgccctgccagccgggggtcctggggtgactagagtgtcagtggcttccacagagtgtaagtccaccctgccctcagaatcagtgtgacctgccaggtgagagcttggaaaccatgaggtgacctctcaggccagaacttgaccctttatcagttgtattaataaaaactaacttttttttgagacaagttctcgctctgtcatccaggctggagtgcagtggtgcagtcacacttcctggcctcaaccgatcctctcacctcagcctctcgaatagctgggactacaggtgtgtgccaccacgcccagctaattttttgtattttctgtagagatggaattttgccatgttgctcaggcttatcttgaactcctgggtcaagcaatctgcccactttggcctctcaaagtgccaagattacaggcatgagccaccatgcccagccaacaaaaactagtacttttgaatgcctactacaagccagggactatgagtgctttacacataagaactcacttcaactccacagcaaccccaggagcaaggtcctgctattagtctcattttacagaaaaagccgccgaggcacagagatgagaagtgacgctcctgagttcacacaggtgggcagtggtagaactggggtttcaaagtttatgttcccccctcctggatgtcaacacacctttctggacaggacccatgctctgaagctgggaattatttggtggaagtgttcaaattctccaggcatagtggctcggcctgtaatcccagcatttgggaggccgaagtgggaggatcacttgagcgcaggagttcaagatcagcctgggcaacatggcaagacccctgtgtccaggggggaaaatgtgttcaaattcctcagtacttgccaatatatttttaaacaatgaggctttccttccctccctctcagctgattataaaagtagtatatctttattgaagaggaaaatatgcagaaatcagtcatgctccctgcacccagccctcagggtggctaagattagcggtgggccctctcgctcacctgcagccaccacatcctggctgtgtgggtggacgtgtgcgtctcctctccccggagtcggagctgccctggcccaggtttcagcctctctggctgcggcttggctgggctggcctcactggcaggcattttggagacagttcagacatcgcgagtacacattcctcagcttcgcctcacactctccaccagattggtattaacgctgggagcgtaaaattggaatcggctggaggaaggggagtcggcactttcgtctgagttttacaagcatatgtgctggctgagccaggcctctgaggctagagcccttggcatatgcttcctggcccatttcccacccacccacctctacacacacacacacgcacacatctgcacatacacacacacacacacacacacatgacgtggctgattcagcctttcagccctgctacagccagaaccccagggtggcagcagcacgagagaagcctccatcttgggttcacccaatgtcgttttgctaaggatacactcactcactcattcactcattcattcattcatgcacgtgtgcatttatgcatccgccacccatatgggccctgtctcctggaccaggctctggtcttggcctgtgagcagtgctgactcagcagcttctgttttagaacccacattctaaagggcgtggaccatgaatagataagaatttcagagggcaatgagggctgtgaagaccaggaatctgggtggctccagagtgcctgccggggctatatgagatcaggtgctcagggacagttagatggaagccagaaagacagactcggcgcagtggctcacccctgtaatcccagcactttgggaggctgagtcaggtggaacacctgggatcgggagttcgaggccagcctggccaacatggtgaaacaccgtctttattaaaaatacaaagttagaacgggtgtagtgcctcacacctgtaatcccagcagtttgggaggctgaggcgggtgggtcacctgagattgggagttcgagaccagcctgaccaacacagagaaactccgtctctactaaaaatacaaaattagctggacgtggtggtgcttgcctgtaatcccagctactcaggaggctaaggcaggagaattgcttgaactcgggaggcagaggttgcagcgggccaagatcacgctattgcactccagcctgggcgacagagtgagactccatcttaaaaaaaacaaaacaaacaaacaaacacccacacacacaagcagggccacaccccatggagaaaggagagcagggcgctataggcagggagtggaggtgcagaggccctgtggggtgaggctgggcactttaaaggaaccaaagggaagcacgtggagggaggagggaaggtagggctagatggcaggaggcctgacaggtcttgggaggactgcatttcatggtattattgaaggagaggctttcccagaagcagccagcactgaggtgtcctcattcctgttcctggtatgagaaaaatcttttctattttactaatggaacaaagcaggccacagaggtgctgccttgtctgagatggcactgtagtccccacctctgctgcctttagccatgtacacacgtgcatacgcacactaacacatgcccatacatgtactgagcacagagacagtatgaaaagacagacaccagaggtcacaaatgggtgagttacattttactgggcctgaacagtatttttttttaaagtgtagatttattgctaacattgaataaaacaagatttttcgtaaaatctgaatgtcctttttaaaatgatagtgtctgagatttgatgggctcttaatatgtactaagcactctacttgttgaataaggttagtgtttttgttttttgaaatggagcttgccctgtcccccaggctggaatgcagtgtcatgatctcagctcactgcaacctctgcctcccgggttcaagtaattctcgtaccttagtctcccgagtagctgggaatacaggcatgcaccaccacactcggctaattttttttgtatttttaatagagatggggtttcgccatgctggccaggctggtctcaaactcctggcctcaagtgatcagcctgccttggcctcccaaagtgctgggattataggcatgagagctattccacctggccaaggttgatactgtttttaatccccatttttcagataataaaatggaggctgatagaagttaagtaacttgccaaaaggcacacaagtaactgttgagaggtagaatttggattctaatccagagagtctgatcatagctcactgcagccttgaactcctgggctcaagtgatcctcctgccccagcatcctgagtagctggaactacaggcacatgccaccatgcctggctaatttttcaattttttgtagagatggggttttaccatgttgcccaggctggtcttaaattcctggcctcaagtgaccctccctggcttcagcctcccaaagtattgagattacagtcatgaggtaccatgcccagccagaattctttttttatttattttaattttatttatttttaagtttttaaactttttatttgcatatttaaaaaattgtgcattccaataattaaaatcatttgaacaacaagaaaaaaatggcactctgattaaactgcattacagcctgcaggacaccttgggccagcttggttttactttagatttcactgttgtcccaccccacttcttccttcaccaacatgcaagttctttccttccctgccagccagatagacagatgggagaggcagtcgcggccttcgttgtcagtagttctttgatgtgaaaggggcagcacagtcatttaaacttgatccaacctctttgcatcttacagagttaaacagctaaaagaagtaaaataagaaggcaatgcttgtggaatgtacagtgcatattgacggcacacgcctcattacgattcgcctgcttgcttctcctgttcaatcgtttctttggaaggcagtggatttttctcttgcgtctctgtcttcttcagtttcgacttatcgaatttctcgatctcagccatatcggatttgtcagacatggttacggaggagaagcggagcgaggcacgcgagaacgagcgaagtctggtctgcgtagtggccaccactgagttgtccaattttatttatttttttgagacggagtttcactcttgtcgcgcaggctggactgcaatggcgcgatctcagctcactgcaacctccgcctcccgggttcaagtaattttcctgtctcagcctcccgagtagctgggattacgggcatgtgccaccatgtccggctactttttgtatttttagcagagacgcagtttcaccatgttggccaggctggtcttgaactcctgacctcaggtgatctacccgcctcagcctcccaaagtgctgggattacaggcgtgagccaccgcacccctttttcttcttgaaactggcagctctgcacttgaggcctggagctgagtggtccctgtgggcctggactcagctttctggttgaccctgcttcccattaggccccctttacctgcttgtttcctgccaggcccttggtggcttctgagttcgaatatacagcacatccactattaaaatgagcaattgtgtgtccttaacgtagatgaaaagtacaaataaataaataagcatttgggctatttctataaaatcaacttttaacaaaaaaggctttgaaatctgatgaatgtgccctgagacccccgcccctgcccctgccacttcctgactttgtgactttgagcaggtgacccagcctctctgagccttgatttccctcccctctaaaatggaggctaagaacagggtccctatggggaaaaagcaagaggccaccagcgggagctgtgaccgttgtcagggtttctgcaggtgcccctccagctaagcaggccctgctgccttgcagggagccccattggagggaggctggtcgcagtgatgaaaggcctggagtccccaccagcccagggagtgtggccaggaatgggctccagcctgcacagatgcggcatcatggcttctccgtgtccctcaggccttcgtcaagatggttggacaccacgtcgccttcctggaagcagacgtgcttcaggctgagcgggaccatggggccttccctcaggccctgcggaggtggctgggatccgcagggctcccctccttcaggaacgtgagtatcctgccccgagaagtgaggggagggcctctcccccttcgctccgcagaccccagcgtggggaggagcatgcaggaagcagagttcaggggggcacatttcacttctgcagacaggaaacgggtacaggcggccaggcacctcagcctttctctgtcccctgtgagccctgggctgtgacggttcgtgtgctcatgtaccatttattgggcgcctactgtttgctgagtgccatctgaggttactgtggtgagcagaaacagctcccgccctcctgcccatccttgcacacttagggacagtgcccaggatgacatctagaattccggccaggttgcccttcctgaggcaggagtcagcctcaagctggcccaacaagccggggaagggggacgggcgtccctcctgcatatggctctttgtggcctgcaaaggctgttctcttcctcatctctcctctgtcttcctgggatcctctccgtggccccgcaaggaaggaaggatcatgtgtcctttttgtcttgttttgaaatggggtctcactctgtcacccaggctggagtgcagtggcgtgatctcagctcactgcaacctttggcctcctgggttcaagtgattctcctacctcagcctcccaggtagctgggattacaggtgcacgtcaccatgcccagctaatttttgtatttttagtagagatggggtttcaccatgttggccaggctggtctcgaagtcctgacctcaggtgatccacctgccttggcctcccaaagtgctgggattacaggcatgagccaccgtgcctggccaatcaccctcagtttataggtgagaagacggaggctcggggaaggagataaggggacttgtctgaggccacgggcctggagcgcctgtttctggtgacttgcccccttcacaggaaaggtgtcacctagcggggcctcttgtggctccttgggctctgcctgcaggtatcccctctactgccctgtctccactgttcctacctgtccacaccttatctccactttatcacagcagcccatttagtgagtgctttttgtttttgagataggatctcattctgtcacccagactggaatgcaggtgtgatcctagctcatcgcagcctggaactcctgggctcaagtgatcctcccaccttagcctcccaagtagttgggactgcaggcacgcaccatcacacctggctaatttttctttttgtagagacagaggctcgctttgctgcccaggctggtctccatctcttggacttcagcgatcctcctgccttgacttcccaaagtgctgagattacaggcatgagctaccatgcctggccttattgagtgcttacaaggttccaggctctgcgttaggcattttatatgcagtaattcatttatctttcccagccatcttgtgtgctgggtactaacagtatctccatttaacaggtgaggaaatgaaacttcagaaagtgtcaggggttctgcccgtgggcagaatttggcccatgtcaactcattctatttggccaggcaatgtatttaaacattgtgacttgaaatgcctgatagggcatgtgctttccagtcacaggctcctggcctcattgtacctgcctgaggcatgtgctgttcacctgcctgaggcatgtgctgttcacctgcctgcttccaggtgagtgttttgcccaagcttgtaacagctggacagtggcctcccagatctcatggtctaggaactcctcttgctccttcagagaccaagttaaagacatctcctgtgagaagccctctgggattgcccctcttcagacaaactccatttctttgctttccaaagacaatgaagtcatgaactgcatcctttgtcctctccctcaacttatggtgaccattcccgagtgacatttcccactgacggctttaaaagcacatttggggccgggcacggtggcttatgcttgtaataccagcactttgggaggccaaggcatgtggatcacttgagcccaggagttcaagaccagcctgggcaacatggcaaaaccccatttatacaaaaaatagaaaagttagctgggcatggtggcgcatccctgtggtctcagttactcaggaggctgaggtgggtggatcacttgagcctagcctgggaggtggaggtttcggtgagccgagatcgcatgactgcactcagcctaggtaacagagtgaggccctgtctcacaaaaaaaagcacattaggggccagatgtggtagctcatggctataatcccaccactttggggggccaaggtgggaggattgcttgagttcaagaccagccttggcaacaaagcaagaccttgtctctacaaaaaagtatccaagtgtgatggcatgcacctgtggccctagctactcaggaggctgaggtaggaggatcacttgagcctaggagtttgagactgcaatgaaccatgatcatgccactcactacactctagcctggacaacagaacaagaccctatctctgaaaattaaaaaaaacaaaaaacaaatttaagacacatggggggcagaaaggacacaggaccttggctgcccatgtcctgttagaacccaagtatcctaacagtgggtcctgcctgtcatttaatacacttcttgcagtctgcacagtcatcccgatgaggttggtgctagtgttcccatttacagaggcagagactgaggcttggagatggagaatcacctatccagagtcactactgggtttggaatccaggcctgtggggtgtgaaactgaggtccccccagcactcctgctgcagggatgtggcatccccccccggggtgtggctggggcatgctgggacctgcaccctctcctctccgccacactgggccttgctaagccttggagagccccctagacctacctgcagtgacttgttccaggaagcgcgtcctggccaggggtgggtgagtcattcagcaaccccagtgtgttgttcttggccccacaagggctttgtctgggggaggtggtgcagcctagtgtgtgcgtatgtgtgtgcagacctgaaggctccagggctgtggctgctccagggtgtgagctggaggggcccttgcagaatgatgatcatcaccgctggtgttggggccgactctgtagtcgcctcacaccccaccctgtgaagagggtgtggtcattgttcctgttttacagatgaggaaaccgagtcactgaggggttaagttgcttgcccacccagaaaatggtggagctgggatttgaacttgtgatgtctgggcccagagctggtgccctgcaccccattggtccattctatgccctccctgaccgccggacctgctctctgggaggtgagagtcctcgtagggtgcccaggcattctcagtgtcttccatcttgattatttcaaagctgggattttgtgccatctgtagtcagttcccctcagcgcctcctcccccagggtggacacctcctttccttgaccctgaagggccatcaccctcagaggctgacattccagtctccaccaagggcttggatctccaccaagcccttctcccggggcctgttccaatgcccggcataggtctgagaggcccaggcagccgggggctcggagagctttggtttctctcctggtctctcccccaggaccccactgcccccctgaggcaggtgtttgaggcctcccccgaccccaggctggcccgaacagtgaccatccagacgcagcagccagtcagggtgacctggccatgtggcgcccctgggctgtctgttcctcacccacccgtgctgcctccaaagggtccatggagtggagagggctgaggtgggacaaggatattgggtggccccacgggaatgctggcatgggcttctgcccccatgggaggagccacaccactcaccagaggcgcagcccccagagagggcaggctgcccgctgcccaggtgacttggtgctggtgtggacattgcctgtggcctgggctggcccgaggggtccggtgcaggaagtgacctgtggatactagcgatccccctcagccagctttccgactggatcctggcctctcagccctacctttgagctgcctgagaaagaggcatttgctccacagacggagccagcctgtgccccaggcccttggcacccagccacaaaaatgtacgcatgaccatgctacaacacatgtatttcatggcacaaaagtccacattttcatgctgcactatataaacgaaaagtttttagttatgcttttatattgatcgttataacattgtgaggttttaataagaattgcccctctcttttattgtagctaagccccttctgtgacatgtcttagctgtgtgaccatgggcaagtctcttagcctttgtaagcctcagagacagccaggcacagtggcttccacccataatcccagcactttgggaggccagggtgggaggatcacttgagctgggaactacatagggagaccacgtctctaatttactagatattattaaaataatacctttttgagatcttaacgttattttgaattgttccgagatggcttctcagtgacctcagaataaaatccaaactccttgtcatggcctgcaagagggtgcatgatctggtcacgttcagtctctctctcttttttttttttttttttttttttttgagacagtctcactctgtcgcacaggctggagtgcagtggtgcaatcttggctcactgcaacctccgcctctcgggttcaagcgattctcctgcctcagcctcctgagtagctgggattacatgcacccaccaccacgccaggctaatttttgtatttttagtagagacagggttttgccatgttggccaggctggtctcgaactcctgacttcaggtgatctgcccacctcggcctcccaaagtgctgggattacaggcgtgacccacgacgcccagcttaaaataatatctttaaagttcaaaaaaaaattaagcctcagagagtctgactgagtcagtgagccggcacgggcaggttcatgagaggctttgcttgctagaaaactgtttggatttgatggaaaatgatgagggcccacgctaaagcagaggaggaaagctccggaactctcaggagggattccgagcatggagcggaagagcgtcggccacctgaaaagccagccggtagagtgatctcagctcactgcaacctccgcttcctggggtcaagcgattctcctgcctcagcctcccgagtagctgggattacaggcgcgcaccacaatgcctggctaatttttgtatttttagtagagacggagtttcgacacattggccaagttggtctcgaactcctgacctcaagtgatccacccacctcggcctcccaaagtgtcgggattataggtgtgagccgctgcacccggttgaaaagccagctttgcttgtgaggaatggagtggtccaggacagactcaacacttagtgctcagcggtgagcgggaatcacggggcagctgacagagccagccctgctgtgccaggcactgttttcagcttgtcaatcctcataacatcccacaagggaggtgctatttctatctccatcttacagctgaggaaactgaggcatagagagggtaagtaacttacccaggatcacacagttggacatgaggatatgaatccacgttcttctttccatcacatattgccttggtagagagctgtgatctcttcagggagcttgtgtctggtgcaagaatacagacagtgaccaaattcaaagaaaattcagttacaggtgggacacggtggctcacgcctgtaatcccagcactttgggaggcctaggtgggtgggtcacttgagcccaggagttccagaccagcctgggcaatatgcgaaaccccatctctaccaaaaaaaatacaaaactttgccaggggtggtggtgcatgcctgtattcccagctactcaggaggtggaaggatcacttgagcacaggaggtcaaggctgcagtgagccataatcgtaccactgctctccatcctgggaaacagagcaagactctgtctcaaacaatagcaacaacaacaaaaaaaaacagaaaattcagttagatggctgtttctaaagggggccctttagctgggcatggtagtgcgtgcctgtggtcccagctacttgggaggctggggtgggaagattgcttgagcccaggagttcaaggctgcagtgagtcgagattgcaccactgcactccagcctgggtgacagagtgagaccctgtctctgcaaaataaaatgtacaaaaaattaaaagggatcccaggtctgaggggtcaggagtggcctctgaggaggggctgtggaagctgagagctagatgatgagtaagtgtgggtgtggagtcagaagaaagagcgctcccggccaagggaactgccattgcagaatctctgcaacacacctgagcttggtgcttgagaaattgctagtccagcgtgggctgcctgcatgagccagggcagagtggagagagagaaggtctgggaggtagcagggaccagattgtgcagggtctcaaggccacacagaggaatttaacactattctaagggcgattcttgtagcaggggagggacttggccaaatttgcttcacttggcaagaaaccagggctcgttctctgctctgagctcaggctggcattcggggtctgtgacgtcttaggacttgaacaccagagctgagcagggcacgtgggtgccctccaggctgcaggtttggttgtttggaatgtttcctcccctggaaatatctaatgctgtgccctgagctctctggaatcctccccttgccaggtctcagggcccttgtccggtcagaggaaagaaaagagtctccagaaaggggcccaggtcttccagacaaatgtccctgagaccctgctagagggggcagccatcagcccagcgcctgcttgcggagggcccctcacatctggagatggtttcaggcatgtgcggaagtgaaagtgtgaaatggggctggagccctgcgggctgcggacctcggaagtgcacagaggccacagcaggtgtccccttggccgggccagcttcctgctgaccatgccaggccggccctcctcctggctcacgtgcccaggggcacagagcagcctcactaatttgttgtaaaccactgtttgttttctgccgccaaaacatcttgttcacgaggtgtcattttgattaatttttctgatggagaagaacacggtgcttcccagggaagctctttggctgacagcaaagctgactgggccaactcctgactcctgcacagagcgatgctgccctgggggagggaagcttggctgggactcggggctgcctggcccacctgttcacccctacccccaccagggcagcagaggcctggggagaccgtgcttgctgagaccttcccagaaagaaagatgggcagaggggctggaggggagccagggtggctttggagcaaagcagagccaggacaggcagggtgtgagatgtcacctggtcccacagttgcagcgctcccagggtgatctggtaacagcaatgagtgagtgagtcttctgggcatgagacaggagggagtggtggggactgtggcgaattgcagaccccatgcctcgtgtacaggagtggaacctttgcctggcgccagcctcgcataaatggcggccagtggtcaccaggttttcctatatgggggagaaagctggacatttggagggttttttgttgttgttgttttttgttttatgaatcttcccatgtcaaaaagtcagtatttttctaactgttgaatactgtgtggaaaaacatgttgtggctggagcagtggctcacacctgtaatcccagcactttggaaggccaaggcaggaggatcacttgagcccaggagttcgagaccagcctgggcaacacagtgagaccctgtctctattctaaaaaattaaaaataataaaactgtgttgtaccatgggctgcagccagcatagccccagctctggactttaggctgatgacctgtacctcttcgtcccctccactgtggaggatttgagaccagggagaagtagagcggcatcttctccacttttatgcaccagccctggttggaactcttcaactctaaacagcaacatgactaacagccaatagttatattgagcccctactgtatacgaagggctttctgtgcctcatctcaatttcctgtaacaacaccagaggcagatgctattattctagtttacaaagaaaggacctgaggctcagagggggctcttcacttgctcagagtcacacagtgtaactggcagagctgggatttgatccagctttgaccttggtcagctggtcaggtgtgtctctacctccctctgtgagcttcccaagggcagggactgaaacttcaactgccaaggctgcaaactcgagatctttgggctagttctgcctcaaccacacttgctcttcggccagcgtggtatatggatatatttaacttgagttagttgccaaaaagcaaatttcatgtgagatttttgaggatgagaggggaggaagttccttctgacagcaagtagtttttatttgggggggttgctctttgttgaggcctatctggaagcaccccaactttgcccttgtggcttctcatgaagaagcagaggtttgagtgggcccctgagcggcgtccctgcccagccagcatctggcctaccgtgctcactcttggtgcctgctggtgtgtttgagtctcccccccggtagagcacatagtaggtgttcaataaatagtcatcagcagatgttctgaaggcttcttgcctgcctcccagatttcttagggggcgtgtccaggcactggaaggctggagaggattttcaaggctgtaagggaggtaatgaggccatgggcggagctgccctgcccgggctgcctgtaggagtcgtcagtgccaggctcagcgtgctcccctccccagcgacccccccagctcccgccccttgcctcctctccccttcctgtccagccctgcaagtggtggggggtgctgggtctctcccctgcagaatccccctgcaggaggtgactcggggagggagcccgacagctcagctttatctggtggtggaggctgggtaagacacaaacaagaagggagaggaaattgtgaggcgccttctcccggccctgaaccagccactgcttctcctgctgcccccatcagcccttgcagtaaaaatgcagcaggagcagatagcaaatatgaggaccacgactgtggagggccgaggggtgccgggtcccagcccccacctaccagccccctccccacggctcccagggacctcccgggttcgtttccttcaaggtctttggtggagtgctatagggggacggagggttcctggcaggctggtttgggaatcaaattgtgtttttcaggcatttcattcttgctgagattttgaggatgagaggggagaaagttccttccgacaacaagaagttttcatttttgggggggtgctgtttgttgggccctatgtggaagcaccccaactttgccctggttggtgggaccctcaacatgcccttctctcaaagcagcaccaccgtcaggggcatcccctgtggcagcagtgccctgggcccagccctgccatcctggggttgttggacattgtttgcggcctttgcacatgccggttcccctccctggaaaacccttcccgctccccacctggcaatgttcattattgttcaaagccccagtcacacggtcccacccctgggaagccgcctgggttcccccagccagccttcctctggggtcccctaacccaaaccctcgttcattgcctggcgggcacatggcctcatctgcattttctcctgttgttcccctagcctgagagctgctcaagggtggggcctgtgtcttgtctttgccatggtgatgagagttctgatgctgctggagtgttctgggctgtctttgggccaccacaagcagcacttacctgccctacttggttcatccccaggccacccggtacggagtaactgtctccattccgactcttcaggtgaggaaaccgaggatcagaggagttagaacattttaacaaagccagggcctggcccatttgattccagagtcccacattcttcacaccccaggaactgaaattcaaacactcactgagaccaggcaaggccctgagtgatgcagagaggccaggttggggctgtgactggcaggggaggcggggccctcagctgcagcctggaacagagaccagagtggccaggccttgcgctttttgtggctttgtgtgtgtgtgtgtgtgtgttttcttttttcttttttatagttacactctgttgcccaggctggagtgcggtggcctgatcttagctcgctgcaacctcttcctcccacgctcaagcagttctcctgcctcagcctcctaagtagctgagactacaggtgcccgccaccatgactggctaatttttgtatttttagtagagatgaggttttgccatgttagccaggccggtcttgaactcctgaccccaagtgatccgcccatcttggtttcccaaagtgctgggattacaggtgtgaaccactgcacccggccgaggccttgcacattttaaaagagcggatgcagattttctgtgaaatcaactgattttgaaaacaggtctgagaggcttaaataaatctcctcagggcccttggttcaggggcctgcatctgggccttggcaatgatctgcagtgaccgggcagcacccagaggacccaggacatgaactcgtgggtgggtacccacctctccctgcccagcctggcatttgagtctcctcagcgggggacatcatcaaggatgtgaggggtgccagggcccacggctggtctgggttcactttgcaaaaggggttctgggtgagtgccaagggaggcagttggtgggatccctctacaccccccacattctttccacctggcactcctactttttgagccaaacacatgatgttttcttagtcttatatgaagtgtcaatgaatgcagctaacaacatcccctttcatttttttttttttttttttttttgagtcgtagtcttgctctgtcaccctggctggagtgtagtggtgtgatctcagctcactgcaacctccgcctcccgggttcaaccaattctcctgcctcagcttcccaagtagctgggactacaggcacataccaccatgcccagctaatttttgtatttttagtagagacagggtttcgccatgttagccaggctggtctcgaactcttgacctcaagttatctgcctgcctcagcctcccaaaaggattacaggtgtaagccacctcacccagccaacacccccctttctaatcggaatgtcaccttcagggtcactcatcatagagaaactctgtccctcgcagctcctcgtatcataatgcaaaccccattcgcccttaagattgcggatccagttcctgtagcatttggagggggataaccaagagcaaggatgcagaccaggcctcacaacctcagcactgtggacatttggggccaggtccttctttgctgtggggaccattttgtgtactggggggtgttttgtgtactgggggtgttttgtgtactggggggtgttttgtgtactggggggtgttttgtgtactgggggtgttttgtgtactggagggtgttttgtgtactggggatgttttgtgtactgggaggtgttttgtgtactggggggtgttttgtgcactgtagatgttttgtatactcggggatgttttgtgcactggtgggtgttttgccgcatctctagcctcactcgctagatgtaccctccccgcagtgtaacaaccaaaaaggagtccataaattgccagctgtccccgggggcaaaattgccccgagttaaggaccactggcccagaagaatgacagctgtcaagactgggtgatggtacgtggggactcatcatagtcccctcattgcttttatatgtttcctataaatatgaaaaagtttccttataaatatggaaaagaatacaaagttaaaaaatatatgaaagcaggaattctggagccaaacagtcccgggttttgtatcttggtggtgctgctggccggctccatggccttgggagagtctcaacctccccctctgtgaaatgggtggcagttctccagcctcatggcctcaggtcgaggatttgaacgtgcatgatttgctttccatttggcagcttctatgtagcagtattctgatgtgggcgctgttctagcagctgaggcgcataagttgtggagagtggcgtgctttgttgagtattcacgtgaggcaggcacccggacgctctgcgctgacctcattactcacctgctcagctgctgtgtagtgaggcaagttgctatcattggccccattttataaagagcaactgaggcagcaggaggtggagcttctccccacagtcagcgggaggaggtagaagaggtgtccccaggctgcctggctccagagcctgcagtcctgagctccaggctgcctgaagggattcacttatgcacttggcacagcgctagcacatagtaggtgctcagttagggtgggctgcgaggattgcttttgtagacagctctctctggaggggctgattgttccaaaccccccccaccatgcggcaccgtaggtgtgtctctgacgtcttcaaggctgccaaagccaagtcctgaagctgctttttacagaataacctgtcgcctgcttcctgccatgcgctgatgtcggccaccatggatctcgcctgcaggaattgaatggagtggctcactcgcctctgagctgctgcccatctgggtcagcccctccacactgctcatgccaggagcacgccggtgctcaggggtggccgggttcgtggtgtgtctcaagccatgctgggtcatgaggggttgggctagccacgcccacctgggcacacccgccaggggtgtcttgggtcccacctctcccacttcctcccatcttcagccctccattccatcttgaccactgggggaggggcccaggcaaggccccaccctcacccccagccctgcttggtggagatttcggcctctggctctgcatccccaacaattctgtttcctgctgtctctcttcccatctccatctctgttggtattctggtctgtctctatctttgtgtcactgcctggatccatgtctcttgcgttcatcttgcttgtctctgcgtctctccatgtgtctctgcatccctatctgtgccactccatctcctcgtctctcctgcctgtgtctctgtcccatgtctctctgtgtgtcacctacacaatcacaaaccttcactgtgccccctgtcccccaggccacaatcctcgcatcccccttcgtgccccacctccacctgcatctctggctcctccaagagaccttcctgggaccccttcctcctcagactggaaggggaaggggaagggtgtgggccggcagggctaggacaggtctgagtctgtctgccgtccaccagcctggccggcccaggctgggccgtgggcacccattgcccttctctgagccctgatgtccacatcagggcataagtgcgcccacaggagggccccccagggacgcttttgactgtgtcactagagagcaacacttggtacgtgggaactgttagtaacaacagccatgaacctgaggatgaataaatggaggacctgggtccccgcctgggcttagggtctctctggagaataaaactcacaggcagaaactatcagcggataataacaaggtgggctgcatgcatctcacttccatgcctcacagagaaaaagaggaacgagctcaagggaagctgcagaggacaggctgggaaaggcctgcgggagggaagagcctggcccatgtgtggcattcgcagcacagcccacgacaggctgctgggtcgcaggcattcctgagtgaggttgggcccggcaggggatggcaggtgtgatcggtgtcagaacgcaggttctggaatcaagcagtgtgcagaggtgagtcgtttgtcagtgcagactcctgcctgctgcctgcagctgtggattgggtctggaaaaggtgcaatccctttgatgcccacggagcctgggaagtacttggctctgttcctggtcaactttctgctgggaaaataaaccgtgtctcattaggcagtgagttcatcccgatgcctgttctggctgataacatcacaccttgtcatgctgccaggcccaaagtcaaggtcaaagttcctgttacttagggaatcctaataattaacctgggaacctcagccggagagggagatgctggtttttaaatggagtgagaagctggagcagggaggtggctgtttcggggctgggcatctccaagcaccaatttcaaggtgccaccctgatcaggattggtgatcacagtcttccagcctccttgtcccttttgtgtctggtagctctttgctggcctagacctggctccagaggccttgggcagtgcccctggaagtgtgtgcattggtacggggcaggaggggctcagatgacagtggtcagtgcttggagagacatgggggcgctgcttgcagggctgcctgccagcatctttgtgcctgacatgtggcctcctataagctctcactctctggccagcagtcatttattgagcacctactgtgtgccaggccctctgattgattgattgatgagtcacatcacttagtggctgagagatgttctggcacttgtaattttcaagcctccttgtaagttaaacattgaagcagtatcagaactggctcccgtaactgtgatttagtttaaatgttcatattttgaaactgaatgcatttaattacttaaaatgcaacattataacattgtacgtttgtgctgttcacaagctaatgatggcattttagaagcatatgaattcagggagccctgttcagaatgaaatgagccttcactcattgagcagtattttcttccttttttttgagacagagtttcgctcttgttgcccaggccggagtgcaatggcgcgatctcagctcaccgcaacctgggcctcccgggttcaagcaattttcctgccccagcctcccgagtagctgggattacaggcatgcgccaccacacctggctaattttgtatttttagtggagacggggtttctccatgctggtcagactggtcttgaactccggacctcaggtgatccgcctgcctcagcctcccaaagtgctgggattacaggcttgagccacctcacccagctgaacgctattttctaagcactttccgttatatgagcataatgccctatgaggtaggagcaattattagcccccatttttagatgagaaaacagaggcacagagaggttagtaacttggccaaggtcacacagctaggaagggggaccgctgccatctgagggatttggaaatgggacagtttactgcgctggatgaagggactctgctctcaatgctagcagctctggggctttggtgggggatgtcaaagtgcaaattcgaggtcctctgtgacccccacctccacttccacccttattcccataagcaacatgagtctcactgagggaatgggcaggtagtgggaagcctctaaggctttgtgccctgagaagtgagttattccccatcagcagtcccccatttctggttctgttgagaatgtccatggtggggtgagggtgggcggctcagccagcaggatgttctcctctttccctctgtctctagggttcttgagcctggagaccaccccacagtgttgctgcctggagcttccttccatccacctccatgcccatcccgtccccacacagtcccctcttagcctgcttgtctgctccgggagctgccaagaactagcaactccagcccctgggccaggcttaactctgctgccaaacctccaccccatcttcattcattcattcattcaagttagtacagtaatccctggtatccatggggcttggctccaggaacccctttcagttatcaaaaatccatgggtgcttgagtctctaatacagagaatatatagagagaatttgcatataacttacatacatccttccatatactctaaatcatctctagattacttataatacctaatacaaagtaaatgctggacgggcatggtggctcacacctgtaatcccagcactttgggaggccgaggtgggtggatcatctgaggtcaagagtttgagaccagcctggccaacatggtgaaaccctgtctgtactaaaaatagaaaaattagccgggcatggtggcaagcgcctgtaatctcagctacttgggagggtgaggcaggagaatcacttgaaaccaagagccagaggttgcagtgagccaagatcgcgccattgtgctccagcctgggtgactgagtgagactctgtctcaaaaacaaaaaaacaaagtaaatgctatatagatagctgttacactgtattgtttggggaataatgaccaaaaatcagaacatgttcagtacagatacaaccatccttttttttttttcttgaatttttttttttttttttttggtgagacagtcactctttcgcccaggctggaatgcagtgacacagatcatagctcactgcagcctcaaacttctgggctcgagcaatcctaccacctcagcctcctgagtagctgggactacagggatgtgccaccacgcctggctaacttttgtattttttgtagagacaggctcttgctattattattattattattattgtgtgacacagaatcttgccctgtcacccaggctggagtgcagtggtgagatctcagctcactgcagccttgacctcctgggctcaagcaatcctcccacctcagccccccgcaagtagctgagagactacaggtgtgccaccatgcccggctaatttattattattattattaatgtagagacaatgtcttgctatgttgcccaggctggtctgaactcctgggctccagtgatccttccgccttgacctcccaaagggctgagattacaggcttgagcgaccacgcctagcctcggttttgaatatttttgattcatgttggttgaacgcatggatgtggaacccacggatgtggagggccgactgcacttatctttgaaccacctgtgtgagctaggcactgttcagacccttggcgtggaaggagtagaggccgcctgctcctggccctggcgatggcctagtgtgtgatatgccccagggagagccctgtaaggaagggaaaggagaggtgtctgaggaggaggagacaggggccagggagagcctctggggaggtgacttgagagccaggtggctggtgctctgggggagggaagaagtggagggagtaggctctggggccagtgggaggctcagcctggaggctctgagacctgctcagcccttgttttactgggaccgctctgctgcatgtagagggaagatgccaggtgtgcggtgtggagcttagggagcttagagccgctggaatggtccaggagacgtgctggtggcctggcgcaggttgaggggggcaggaggaggtggggaggtgtagccaactctggatgtgtgtgcgtgttaattgaaattttcttttgagaacattgtagattcacattcggttacaagaaataacatggagaggccggacgcggtggctcacgcctgtaatcccaacactttgggaggctgaggcgggaggatcgcttgaacccaggatttcgagaccagcctgggcaacatagggagacccccatctcaaaagaaaagaattagttgggcatagtagcatatgtctggggttccaggcatttgggaagctgaggtaggacgattgcttgggcctgggaggttgaggctgcagtgagctgtgattgcaccactgcactatagcctgggcgacagagtgagatcctgcctggaaaaagaacacagagagatccctttctgtgcccagttgtccccagtggtaacatgcttcaaaaccatagcacaatatcccaaccaggatagcaacatgaatctgacctgctgatcccatgcagagctccccagtccgacttggactcatttgcatatggcataagtcctgtaggtttgtacccattccatacaatttacttctatcagccaagacactgagcagggtcccgccaggtcccctgtgctgtcctttataaccaccctaacccttcctgtcctccaactccctgcccaacccctggctaccactcatctgccctccatttttaagattttgccatttcaaaaatgttctataaatggaacggtgcagtctgtgaccctttgggattggctgttttcactcacatacttccctggagatttgtccaagttgctacatgaattaagagtctgggccgggcgtggtggctcacgcctataatcccagcactttgggaggcccaggagggtgggtcacctgaggtcaggagttcaagaccagcctggccaacatggcgaaaccccgtctctactaaaaatacaaaaattagccaggtgtgaaggcacacacctgcaatcccagctactcaggaggctgaggcaagagaattgcttgaacctgtggcggaggttgcagtgagccaagatcatgccactgtccttgagcctggcgacatagcgagactccatctcaaaaaaataaataaaagaaaaagacaaagagtgtgtcacttgagcccaggaggttgaggctgcagtgagccgtgatcgtgccactgcacttcagcctgggtgacagagcaagacccggtctctggaaaaaaaaaaaaaaaagtctggatacgtttgcaggcagagccaacaggatttgctggggtggtcaagcagcagttagagatttgagcgtggagttcagcactggaggcatccagtattgtgtctccatgaggccaaatgaagtcacctgggagcgggaggcccagaggtgggaggtctgagttcacatggattaggcgtctcctgtgcggcagatgctgtcctgggccaagagttcagcagcgaatggggcagacgagttccctgcgtggtgaggggctgaccagctgcagcatcggtgtgggcatggactaggaagcaggctcgggatctcattcccttatcgtttctctctttgcagctgtggagggctccagggcctgcaccgtgtggagcccacagtgtgggcctggggtggaggggctggaccagagctttgcaggagctgtgagtgaaatgacaagggtgcggtgtttccctgaaggcgagatggcctccgtccagcacggacggcctgtcttctgagatgtcctttatacatttagaatatcatagctttcacagagggatggggttggcaggtgaggggggtgcagttgttttgtgtgtccatgccaggggcaggtgacctgccttgcttgggcgcagagagtcctggaacccttggagcgactaccccagctccctttcccatctccccccgctccagcccctttccccagcctggccgctcatccctgcttccctccccctatgtggctgcttcatgtttgcatcagggccactaggctgttccttcatattttcttttctttttctttctttctttcttttctttcttcttcttctccttttttttttttttttttttttttagatacgggttcttgctctgttgcccagactggagtggagtgacataatcatggctcactgcagcctccacctcctagactcaaacgatcctcctgcctcagcctcccacatagctgggcccacaggcacatgccaccatgcttggctaatttattttattttttatttttactagacacaggagtcttgctgtgttgcccggctggattcttgaattcctgagcttaagctatcctcccgccttggcctctctctctctttttgcctcattctttcctccttatccctctagttttccttctctcttccccacttcccctcattttcccctcctttccatctgtttccgctctctggattctgccctcttgtttttggcacttgctctcttttacgtttttctcaagccgccttttgtttccctttgtgtctcctcctgtctcatgatgttcatctctgtttccactgtgctgtctccgtctctccctcttttcctttctctccctcttaaaaattattccccagaccttgaaaaccatccatcccttttcactctcaggggcctggatggaagaaaatgtcttcatcaggcaaggacagtgcaggagaggggtcgcaggtgcatgtgcaggcccggcagtgctgccggggagaaggacgggcctgggctgagatgcacgggcacagccagacctccaaggacacctcatgtctgaggaaagggggagtttgagaagaggctgccagggctccctggaggcctggaatgggggagaaggggcacaggggacagtccaggccttgtctctgaagcaggtccttcagctgcacttgggctgtgcttctctgtagggagggggcatagctctagggaaggaatttctccaggcctggcaggggcctggaggaggcatctgagcacctgctggttccaggctgcctctcgttttgcactcagggctttttttgtttgtttgtttgtttttgaggcagagtctcactctgtcacccaggctagaatgcagtggcacaatctcagctcactgcaacttctacctcccgggttcttgtgcctcagcctcctgagtagctagaattataggcgcatgccaccattccaggctaatttttgtatttttagtagagatggagttttaccatgttggccaggctggtctcgaactcctgagctcaagtgatctgcccgccttgcctcccaaagtgctgggattacaggcatgagccaccatgcctggcgagggcttgttttttgaatggataacagctgcctgcatcaggaactgggctccttagagtagtatttgtgcaacctgacaacatggtaggtcaggttttcttcccagagctaactggtgctttttttttttttttttttttttttttgagacggagtctcactctgtcacccaggctggagtacagtggtgcagtcttggctcactacaacctctgcctccagggttcaagcaattctcctgcctcagcctccccagtagctgggattacaggtgcgtgccactatgcctggctattttttgtatttttaatagagatggggtttcgccatgttggccaggctggtcttgaactcctgacctcaagcgatacgcctgtctcggcctcctaaagtgctggaattatattcatgagacatcacacccggcctagttggtgctattttcaatacttttttgtggagccaaccaccttccaggccggccaacaaaaccttcaaggattctattgataattcagcatcaaagtgagaaatgtatgactctgatgtgacagcagttggtggccggactgtagccagctgttggtatgggataaggggacggatctggaggttggacactgactgcaggcgtctgggcctaaagctgcctcccttggggaggtggatctcagtgtgatgggggacccctgaacccagcgaggccactgggcacagctgttggtttgttgccctgggctacgaaggactcttccatttgctgctctgtcctgcaagtgggtcaatcccagctccagccaaatccatctgctcatgtgcccccccaaattctaccaccgttgccacccctggcctttgccccatggtgttttctcagccaggagcgccagcaccatgctgtcccttgttccgtgcccagggctcatctgtggcgccttcctcgagtcatccttttgactgatagcacaggatgaagaacaccatcctgagggcacacagatctcaggtgacagtttgaaatgccaaggcagggcccctttgtcaaacttactaagaacttcaagacagggatagcagagcggtagcccacgcccggggcctgattgcatgggtttgcacactccagaggccggcctggtctgttgtacaagcatcacgccggggagtgagttcctaaaccccactgagtcttagtttccatggctataaaatgggatcaccattcatatccctgcagaggattgttgtgtgtgatcatcaagatagagtaagggggagctgctattgtccttactattgatcatgattgatttttttttttttttttttgacagagtctctctttgtcacccaggctggagtgcagtggtgtgatctcagctcactctaacctccacctcccaggtccaagagattctcctgcctcagcctcctgggtagctgggactacaggtgcacgccaccatacctggctaaattttttttgtatttttagtagagacagggtttcgccatgttggccaggctgatctctaactcctgacctcaggtgatctgcccgcctcggcctctcaaagtagcattattgataccatttaacagcaattgttgtctgtgttattcccccggcactttgcatctgccgccttctgtgtgctttatttatatttaaatgactttttggctgggcgcagtggctcatgcctgtaattccagcactttgggaggccgaggcaagcagattacttgaggtcaggagtttgagaccagcctagccaacatggtgaaaccccgtctctactaaaaatataaaactagccaggcatggtggcgcatgcctgtaatcccagctactctggaggctgaggcagcagaattacttgaaccctggaggcggaggttgcagtgagccgagatcgcaccactgcactccagcctgggcgacagagcaagactctatctcaaaataaataaataaataaaaataaagatatacttgtgtgtctatggtgatgagacacttacagtcagtggccatgtgacaggagcaaagcccaggcgccttggtgctcaagtaggatgactccggcacaaaccatcaattgaaggagggagtcaggactctaggacagagggatggggaggggcaggaggaaagaggggacttggcccatggacagcagagtttgttggccaagtttggagggaccagactcgatcaggagctggtgccccatggagccctggttttggagggtgccgtgacaccgactccccccacctgctgtccctgtgtgtgagcttggatttagtagccagcagcttggcaagacttctggggccactcctctgctggtttccatgttaacgcttttcctccagctaaaagcagaatctgtgggaatccaggaaccttccagagctgccccctagggtcagcatcaccttaacaagattgcaccagcttgtccctgctgctggctcgccctggacaccggctgccagctccagcagccccaagccctgtgcttctgtcactagggcctcggcagcctcccatgtccaccagctgctgtggtcactgggccggcagaggctggggtcagggctgggctggactgggcaggaggattcagatgggaaggggccggtgcccacacaagctctgcaaggctgtccagcccaaccccaagggcaggactggacacgcaggggctgcccacagagaaatgggaggggttctgctcacagctgtcagagtgttctggaagactcagggccctggagcagacacaaacattgcaggcaggacaggctgaggtacagaaagcccggagccaggacatagcagggcacccaggacctaggggacaggacctgggggccggcggtagtgggggctgccaccaagagctcagaagagcccagttgagtctctcctcagcctttgaccagctgggaccctgggcacgtggcctagccctgttctctccaagcccgctttctcatctgtacagtgggcatcatcacaggtcctcactcacggctcttgtaagcactggaggagacagcaggggagggacagcagccaccggccgtggtgggggccccaggtcagtagtcccttacttgtagggctcagggtaagcagaggcctctccactggcatcctcttcagccttacggagccttggcctggtggtgtgagcctggagccactgccagcttggatgcccatagggcttcacaggtcctgcaggccaggcggggacagtgacaaaccagacagcgcatgtcgtggctgatggggcagctcactgcaccctgcaggaatgtgggcctgcggtggccagatagctcagtttttctagagaaataggcactcaatgtttatttgaacatcccagttcttcactgttggcaatgaactcatttttaaatttgtctgcaagccggatgctgaccaaaggtgacccgtttgtgctctctgagtgggccagatcaggcaacccctgagggtcctgaggttggagggcagatgctgaagggacatcctggttcctgactgagagctcacccccagccccacacagctccgggggtgcctgtgtgctgggacagtgcagatgctggagctgggcaggcctggggtcaaaccctagctctgccaattcccagctgagtggttatggccaagtgactcgctgagcctcagtttccccttttgcaaagtgagatggaggttccctgcctctctcagccgctgtgaggatgaatgctctgtgacctttcaggtcccatcgcgggccgggcactctgtaaatgctccgttctcggtcactgaggttgaattaagagaggctggggcttggtttatggagtgagactgatctgtttcttctgttgactttaaaaaaaaaattatagaattagagcgaagttgctatgatagtacagagactctctttgtactccttggccagcttcttctgttgttaacattttactgtgtgcattgtcacagctaaggaaccaacactgacacattatgaactcaagtccacagttgcttctgtttccctaaagtctttttctgttccgggatcccatactacattcagtcatcatgtctccccagcctcctctggcctatgacagtttctcagacctgcctgttttgttttggtttggtttggtgtttttggtcttgggcttttgttgttgttgttgtgtttgagagagggtctcgttctgttgcccaggctggagtgcagtggcaagatcatggctcactgcagccttgacctccagagctcaagcaatcctcccacctcagcctctcaagtacctaggactacaggtgcatgccaccatgcccagctaatttttttgggttttgggttttgtctgtagagatggggtctccctgtgttgcccaggctggtcttgaaaccctgcactcaagggatcctcctgccttggcctcccaaggtgctgggattggccaggcatggtggctcactcctgtaaccccagcactttgggaggccaaggtgggcagatcacttgaggtcaggagttcgagatcagcctagtcaacatggtgaaaccctgtctctactaaaaatacaaaaattagccaggtgtggtggcgcacgcgtgtaatcccagctactggggaaactgaggcatgagaatcatttgaacccgggaggcagaggttgcagcaagccaagatcatgccactgcaccccagcctggatgacagagagagactccatctcaaaaacaaacaaacaaaaacacccacacaaagtgatgggattacaggcatgagccaccacgcccagcctcagactttccttgtttttgatgaccttgacagttttgagaatatcgggtaggtattttgaacaataccctttaattagggcctatctgatgtttttctcatgcttagaccagggctgtgggtttgggggaggaagaccgcagaggtaaggcgcccttcacatcatagcaaggatactcaacatggctcagcactgatgctgctggacgtgggtcacctggccgaagtgacgtttgccaggtttctccactgtgcagtttctttccccactttccataccctgctctttgaaagcaggtcactaagtgcagccctactcaagagaggaggggcagatgcagacaaacaatttggaattgttttggaacgattttgagatttgtatcttctccttgtctgcttgcttttgcatctagcagttgtcaattcttgggtgatcctttctttctttctttttttgagtcagagtcttgctctattgcccagcctatagtgcagtggcacaatcacggctcactgcagcctcgacctccagggctcaagcgatcctctcacctcggcctcctgagtagctgggactacaggtgtgtgccaccatgaccagctaatgtttttgtttttatagagatgggggtctcgttctattgcctaggctggccttgaactcttggactcaagcagtcctcccaccttggcctcccaaaggctaggattacaggctgccatgctcagcctgatcctttcatttcattatctaaataacccgggcttgagtcctagctcagcacatttactctctgtgtgacctgggtgactcactattaacagagggatcatgagaacaagaggatgtatacaacaggctgcacctggtgctttgagcaaataggttggtgttttttcctacttgtgacaagaagtactaaggtggcccgttgagctgacagggcgtctcaaggaagtagtcagggacccaggcttctcctggctgctattctgccatccgtagcatgtggattttgtcttcctggtcccaaggtagctgcagcacctctagcctcactgccatgctccaggcaggactcagcgaagctgatggcgttatccccgttttgtagaggaagaaagtgaggcagaggaggatgagaaaccctgccttaaagagtgctgtgaggttagaagtagtgtcacctggtgtgtagtaggcatggttgttttcacagtaggatgggcctctctcaagctccctggcactgggggtgcccagtgccctgggggatgaaggtgggcctctagcagcaggcacctgagctcctccacttggccggcctgaggcttcaggctcagaggggctggcccaggctctggtggggctgtgggtggctggggcagaccctggacaaccttggatcccagcctgtgagtacaggtacagtgtgtccacccccccttttggggtggaggatgctgggcccagcagccctgttgacctgtgcctcttgcctgttctgggcaagccaggactggctggggctgcagtggtcacccaagaacagccaaccacataaaagtcaggcccaaggacagtcactgaggtgggcctggccttgcaactgggtagccatgtctgatgacctactattcagtgctcacttggaagggagatatagggaagggtttgttgttcctgttctatttgggagaacagattgaattcagaggcaaactatggtctagggatcaaatctggcctggcactgcttttttttttttttttttttttttgagatggagcctcgctctgttgcccaggctggagtgcagtggcgtgatctcagctcgctgcaacttctgcctcctaggttcaagcaattctcctgcctcagcctcccaagtagctgggattacaggcacccgccaccacacccagctaatttttgtatttttagtagagatggaatttcaccatgttggccaggctggtctcgaactcctgacctcaggtgatctgcctgcctcagcttcccgaagtgctgggattacaggcatgagccatcacacccagcctgccattgcttttctaataaagttttattggcacacagccatgccttctgtttacatatctatggctggatttatactacctgggcagagttgagtggttgtgacagagactgtgtggtttgcaaagcctaaaatatttactatctagctctttacagaaaacattttgctgaccctgacccaaaaaccaggcagggtcagggatgtgcgattagggcttcccgagagggagatgcgggtgggcccagactggcgaggggctgcggcgggtttgtagaaacagggcagcacagggcaaacggaggccctgaggtggtgggcttggctttagagcagagcttgttctgactggggggcttcagaggagaggctgtgaacccagccggggcctgaggcttcaccctgtcacgtgctgtgacagccatttggggtctttgtgagaaacggagctgctgggtgttgcggattgccggggccaactctgaggcttcggccagacgcagcaggttacaggaaccgtggggatctcaggctggggctcctcagctcagccaccctcagccatgagggactgtgggcccggagttgcccaatggtctgattttccaagagaaaccggcagtctgcttttcacgggaaatctgatttttacatgtttgcagttaattccatttttacaaaatcacaaagccgacccagcacacatgcatttggcctgtgccctgcaggtctgggaactcaggtgcgcagggtggacgcagggagctgcgggggtgtggggagactctgaaagcagccaggccctgcgccccagcactccctgtggcagaggcgggccttgggctgggggtgggctgcggaggagctcacagccgtgtcaggtttctgtgtcttgacctatcctatcccagagcagagaacattcctgcctgcggcccgggaggagggggtggggagctggattccaaagggttggacgcacctcctggaccccagcggggactcattcccagccggagggcgagaggtgggacgtggagagctctgaagtcttctctgagattttcaaaggtgaaaaccccagggtttgagtttgctgctccatcctcaaggagccctagagggcgatgggcaagggctggtcttggagctggacaggccgaggggaccccagctccagtgctccctccctcccgggacccctgagacatagcgactcctcccttgcaggctgccatgatagtccaagagagaacgggtgtgaaagtggtttccatggcatgcgggtgtgccggtgagggggtctgcctctgggaaatggtcctgtccacccgccagggcgtctgcagccggacagccctgcgggcatctggttgttttcagcctcacacaccagcccttacctgctgattcaggcggctggtttcaaagcacttgctgccacccctgggggtttattatctatttcaggcaggactcttagttacaagcaaccctggtcagtgtggcttaaagaaagaagagaattttgaggctcatgaacaggaaaagccccagggtaactccagccttcagcaaaatagggttcacgcgctccaagtgatattggcaggactctgtcttgccgcgtcttctaactctgcatccttctgtgcggggttcattctcaggcgggcccctggtggggtggcaggagtggcctgtcacctgaactcccaggaacctctggggagagcatccctgtcccagtagcaagaatcgcagtggccctgtcacatgcttactcctggactgatctctgtgggtggagggtgagctgctcacatgggctaggcctgctcttggccccagcctgagctgtgggggaggtggggagctgctcggatggggagttgggcacaaggggatcccttagaaaaatcaagatgcagccgggcatggtggctcacgcctgtaatcccaacactttgggaggccgaggcagacagatcacttgaggtcaggagttcaagaccagcctggccaacacggtgaaaccctatctctacaaaaatacaaaaaaattagctggttgtggtggtgggcgcctttagtaatcccagctactcaggaggctgaggcaggagactcgcttgaacccggaaggcagaggcttcggtgagccaagattgcaccattgcattccagcctgggcaacagagcgagactctgtctcaaaaaaaaaaaaaaaaaaaaagaggggccgggcatggtggctcacgcctgtaattccagcactttgggaggctgaggtgggtggatcacgaggtcaggagattgagaccatcctggctaacacagtgaaaccccatctctactaaaaatacaaaaaaattagctggacgtggtggcgggtgcctgtagtctcagctactctggaggctgaggcaggagaatggcgtgaacccaggaggcagagcttgcagttagccaagatcacgccactgcactccagcctgggcgacagagcgagactccatctcaaaaaaggaacaaaaaaaaaaaaagaaaaaaatcaagatgctagcaccccaaggggaaatggacagacaggcggaaacagcgcccacccatgcccaccactctccaagactgtgttttggtctgaagaggaaacacctgagcttcctggctcatgcccctctgcccctgcctggctgacttcagcccagttctccaaagagctgtgggttactcacccacgtgtctccagcgtgtcctccaaggtgtcaggcttgggcctgagtggatgtggagcggcaccagcctctgcagccttctgtctggtcttccaggccagtggccctcctgaaaaaggaaagcatgcttgttctccttggagcccctgggggctcctagtgattgacttcctttctgagtgcacgggaagcagctgttcaataatccattgtgacgtttggccagacaccgacagagcttgtctccctgcgacccccttgtccaaatgcagggatgacctttcccctctgtgaccaggaaggatgcaattgttgggggtttcttacattagttctctccaggcctaaagacgccatcacatctagagctgccggcggcctctcgccactccctctccttggcttcttcataatgatattgatttttcctccatttttagaatccatctccttgagggaggagacagaaactccatccctctgcacagaaccatttcaaaaaggaacagggggttgggatgaggcccagctggcctaggagaggccgcctggctgggccgaacactggctctggcctggcctggtcactgacccttgcctgggtcctcaggaccaggagaagaagggccgtgtcttttcagatcacagaacactctttggcccctagtcatgtgtcaggatgagaggggcggtctttgaactcccatgattcacttgaatgttgcattttctagatatcatgacagccagatctcaggccatcattaaaaagaaagaaggtgaaattccacacctgtgggttacccaccagcggcagccctctggctggagatgtatcttgtggctcagctcctgtttgtgttctgattgcagtgccatcagggggacgtgtgtccactgacccacagaggcaggggcagctggggaacgtgctaggagaggaggggcaggcaggaatagaccttgtctcccgagtcatcccctgagcaggctgagccaagagtggctgactgaggattggctgggcacaacgttccattcgccgtgtttgaggttcacccttggccaggtgcgtcacttgtcctggttttccagatgtgaaggtggtgacgcaggctggtatgagatccctagatgtcagagcatgttttagcttatttaagatcctttgatggttcccttctgcaacaggctcggtgtgatgtggtggtaagtcaaggccctggagcccagacgtgattacctggccactctcacttttgggggacacatgaaacagcctcctgctgtctccactgtcgcccctagagtgtattctctctcctgctcttcctgaagtgcagacctcatcacacacacagcctcctgcttacgagctgcaaaggccctcagtgctcatgggatcaaggtcatagcttggcttgcaagatcccaggtggaccccagccctttgtctggcttcctccctgtctacgcgctgatccccgcagcccccacactccacccactcagcacaggctgttccctcggcctggaacaccggcccttggtacctctatacccctgttctcctgactcctggccagttgctgctgaggctgtgaaggtcctacacggctcagcacccggaaactcccccaaccctctaggatgagctgaggccccatctgggttccccaggcctttgtgcctgtcctgccatcagcccgcatcatagggtggcattgtttctcctggttcatttgtgtccccactaagtgccatgccccatgagggctgggatggttgtcttgttcacagctgtgtcctcagtgcacaggacagggctggcctggtgcactgtgagttgccggctggtggacagatgcttggaggatgtgtgacttggggcagggcaactcctgagtcttgatctccccctctgcactggggtcatggtgtcaagtgcagggggaggggagggaaggggagcaggcagcatggggaggggcctgcagaggtgtctggcagtggggaagctgtcattggccatagtctggagcccacatccctgtactgacacgcagctttcagctgtagccagaactgggtctcagccagagtgggcagaggtggccaggagacgagacagtgcagggagctgggggacagggttagggggtggtgagaaggtcccctccctctgtcctccttgaccatgcatccttgctcatctccaccggctccaaccaggagcagtagcccgggagccctctccttcttctggtgcaggccgtggtccttacaacctggactctgcatgagaatcacctgggagctgtgaaatgtcccacacccaggccacgcccccgagtagagacatctgaccccctggcgtgggccccgggcatcagtagttcataaaactcccaggagattccagcgcatggccaggtttgacagccgtcattccaggtggttcttggtgacctggtttttcctggagatgctcagcagcctgcaggagcccgccagccagcgcacagtgagcggctcgatgggaaatctccccttctccgcctccctccacaaaaatcctcaccagaaacgaggaagcacttcttaaaatggttttgttttttgaaagagtagcacatgcctatggcaggaactccaggcagcacagatgggtacacagtggaagaaaaatcagtcctggccgggcgcggtggctcacgcctgtcatcctagcactttgggaggccgaggcgggcgagtcaccggaggccaggaatttgagactagcctgaccaacatggcaaaacctcatctctactaaaaaaaaaaaaaaaaaaaagaaaaaaaattagccgggcgtggtggtgcacgcctataatcccggttaactcaggagactgaggcaggagaattgcttgaacccaggaggtgaatgttgcagtgagccaagatggcaccactgtactccaggctgggtgacagagcgagactccgtctcaaaagaaaaaaaaaaatcagtcatgccaccaaccacagccactgtacccaggctctgagatggccctgcagagctgtcacgtgtcggtataggtccctttgtcacatgtctacccttctcaccttgctttcttagtcctcctctgccagaacatattgatctgcctggctttttcttttttcttccccgagacattgtctcactctgttttctaggtggagtgcagtggcacaatcccagctcgctgcaacctccgcctcccgggttcaagtgattctcctgcctccgcctcccaagtagctgggattacaggtgcgcgctaccatgcccggctaatttctgtatttttagtagagacaggctttgactgtgttggccaggctggcctcaaactcttgacctcaagtgatccgcctgccttggcctcccaaagtgctgggattacagtcatgagccactgcgcctgggctgcctggctcttcttgatgcctacagagtattccattgtggagagggcctgacatggatgccttggtccctttgggtggccggctttggctgtcacaggcagtgctgtcagaggagctcagagtctttggtcatatgtgtgagtcctgcaggatgaacttgtagaccgggaattcctgggtcatggaacaagtggatccaaatcgctgatagagcttcatttcttgtcattccagaagtcacctgcaccggtgcccgtgacgtacgagctgcccacactgtataggacggaggactattttcctgtggacgccggggaagcacagcaccacccccgcacctgccctcggcctttgtgagctttgtggtcttcccatcaggaacgctggaaagtgacattgtgtacacactgcagcttgggggttttttctttgtattgctgtttattttatattttaaaaatatttaaaaaaatgtcgagatggggtctcactatgttgtccagactgatctcaaactcctgggctcaagtgatccacccaccttggccttccaaagtggtgggattatgggcaggagcctccgtgcccaggctgctgccattttcaaatttcctccctgcctcatgtgagaccacagggtttggagaagcagttggaacccacgtgtggtgatgcctcccacatcggcctgcttggggttctacaggggttgagggaccaggcctggccggggctgatggacagtggggactttccttctctccatgatggctttgcaggggctccatggtccttctctctgtgatgggtttttgcacggggtgtgctctgccactgtggtgggtgggtggatgctgcttctgttgcctccagacctcggtgcccacagccttgaggatccttccaataaaggtgtcaagagctcagccctggtctggtgtgagaatgacggggagtgatagtttccttttcacctgtgcagtgttttctagaaggttcctcctgtgcctcacctgcgagggcctgatcctgggcacctgctgatgaggctccagctgagggaggggtagtcccggcctttggatttccagcaagagtgcagaggtcattaggacccccagggtcttcaaaggcttgtttacccacatttcttcccatgcagatgagtttcctgctattgtcctaacactccggatttctcactgtggcttcaacctgcaatgggtatttctggaattcctcgaagagccaagaacacacacataattcccctatgcacatacaggactgaactgtaaatctgcattagaatttcaagataatctgcctgggcaaggtgactcatgcctgtaatcccagcatcttgggaggctgaggcaggagggtcgcttatgcacagggtcaagactgcagtgagccgtgattgttctactgcaccctagcatgtgcaacagagcaagaccctgtcccccacaccccaaaaaagtttttcaaggaagcctaaaataatgaatctggcaagatagagtagaggccaggtgcagcggctcatgtctgtgatcccagcactttgggaggccgaggcaggcagatcgcccaggagtttgagaccagcctgggcaacataatgagaccatatctctaccaaaaatacaaaaattagcctggcgtgctggtgcacatctgtggtcccagctacttgggaggctgaggtgggaggattgcttgagcctgggaggttgaggctgcagtgagccatgattgtgccactgcactctagcctgggtaaccaagtgagatcttggctaaaaatgtttttaaaaattaaaaacagaaaagcagggaaatagtttagacaatttttggaattcagagatataggtagaccccttgtttctggaaaagtcagcatttttattctcttttcttttttttcgagatggagtctcactctgtcacccaggctgtagtgcggtggcatgatctcagctcactgcaacctccgcctcccgagttcaagctattttcctgcctcagcctcccaggaagctgggattacgggagcacaccaccacgcccagctaatttttgtatttttagtagagacggggtttcgccatgttggtcaggctggtctcgaactcctgacctcaggtgatcctcctactttggcctcccaaggtgctgggattacaggtgtgagccaccatgcccggtcagcatttttttattgaggtgacttttacaattttttttttctttaaatgagacacctgtcacccagcctggagtgcagtggtgtgatcatggctccctgaaacctcaagctcctgggctcaagtgatcctcctgcctcagcctcccaagtagctgggaccacaaatgtgcaccaccatgcctggcaacttttcaaatttgttttattttttgtagagacagggtctccctatgttgttcaggctggtcttgaacttctgggctcaggggaccctcctgtttcggcctcccaaaatgtagtgttggcacaaacctttattgaagtataatttatattacagaaaggggtgcctaagtggttcactaaatttttcacaaactgagtgtatctatttaagcctcaccagactgagcaaccaacattatcagcactgagcagccccctcatgcccgcttctggtccatgcccatacccacccccaccccaggctgacagcatactgacatctaaccatatggactggagtttcttgtttctgtgctctgtataaagagaggacacacgggatgtgtacctacggtgtgtcatctcttgtctctggcctcaccggcttgatgttaccttgggaggtgtcactgttgctgtgtcactgtagatcattcccatggctgtgttgtattggctgggactgtttttatcgaagggagcttggacactctgcatgccccagtgtgctcagggagagcacacgttggatggaaagttggccgggtgaggtggctcacgcctgtaatcccagcactttgggaggccaaggtgggcagatcacttgaggtcaggaattcgagaccagcctggccaacatagtgaaacctcatctctactaaaaatacaaaaattagccaggtgctgtggtgcacccctgtaatcccacctactcgggaggctgaggcaggagaatcgctcgaatctgggaggtggaggttgcagcaagccaagatcgtgccactgcactccagcctgggcaacagagcgagaccctatctcaaaaaagaagaaaaaggagaaagctaatgttaattttttagacaagcagttgaggacactcatttccggaagggtgagtatctgctgagtgttgggcactcccaggcttctttctcctcccagcccctgaaacaggggccagggagagttggaaggaaatcccatgtgattaagccgcagcaacgttgagtgtcctaaagcagggacccacaggccccacgctaggagcatggccctgaggttagcctgcctggcagcactgtccgctcccatgcctcttagctgtgtgagctgggcttttcacttgctctctctgagtccagctgcccctgcggtaagacatgaggatggctctggtctgatgggttgtggtgagggtgacatgaggtgagctgtgtgcatgctgggcacactggcgaggggctctcagtaatgggaggctgctgttgcagggcccgggctgtgatggggaaagggttgattgtcctgcgtttctcagttgaccagcggcatccgagggcctgaacagcgagtgactcagggactgcccttacgtgtcagagttagaagtcatgggagaatggaggctgctctctctgggtttccctgtcctgttaggaggggtgaggttgcacaggaaatctatggggaaaaggtgacaagtgaactggaagtagccgttccaaagttcctaggatttgcactgccaaacaatgagctttaagggacgcttggaaacatctggggagaaggaaggccgggacactgcgccctgccatcaccaacccctaacctcagtcctctgagcggctccactgtccctgtgccaggtgacttcatgtgcgtcctcattaaagcaaagtgcctgacatttccattgtccagtcaatgatgtcctcggttgctgactattgatggcctctaaccccttggtaagggtaactgcagcctaggaaagggtgatctgatctttctcttttttaaacagagacggggttttgctatgttgtccaggctagtctcaacctcctgggctcaagcgatcctcctaccttggccacccaaagtattgggattacagtcgtgagccaccgaggcctgccagtctttttcttttgtggctgatgttggacagggacaccagtagaaaggtcactgcagatttcttcccaagagcaaggctcttcggtcaaccccctttcccactttcccagcggatgtgaacttcgtgctcaccaaagcaagaggtttcaaggtagcagcccatggggttgtatctgattggcagaaatgtgtggtttgccctgaattgttttaagatgttttcatgttgtgacaattgggtaaacttctggaaaaaatagagctccatacctcactcagcacacctggattgtaaatcgattaggagcttaatgtataaaatgaatctattggccgggtgcagtggctcacacctgaatcctaccactttgggaggccaaggtgggtggatcgcttgagctcaggagttcaagaccagcatgggcaacatagcaaaaccccttctctgtaaaaaatagaaaaattagccaggcatggtggtgcttgcctatagacccagctacttggtgggaggtgggaagattgctcgagccagggaacttgaggctgcagtgagctgagattgtgccactgcactccagcctgggtgacaaagtgttaccctgtcttagaaagtaaaataaaacgaatctattgaagaaataggttaaaaacattggcgaagtgtacaaaatcgagaagccataaaagaggtcaatttgattatataaaatttttaaacttctgcatggcaaaaccaacggaaaactcaaccaaaaaatcccaaaacaacaaaatcctaagcaaattcaaaagatagatgacaaattgggaaaatatatttgcatctcatgctacaaagggataatctccctaaaaaatgtcacctacaaaaaagggaaacagtagcaaaacaggcaaaggctatgaacaggagtttcacagaaaatgcaaaacatgaaaagatactcaaccttaatgtatgccaataagtatggaaaaataccctgagatttttcacatttcaggctggcaaggattaaaatttttgatgacactattgaatttttttttttttttgagacagagtctgctctgttgcccaggctggagtgcagtggtgtgatctcagctcactgcaacccctgcctcctgggctcaaatgatcctcccacctcaggcacccaagtagctgggattacaggtgcgcaccaccatgcccagctaatttttgtgtttttagtaaagatggggttttgccatgttggccaggctggtctcaaactcctggcctcaagtgatccacctgcctcagcctcctaaagtgctggaattacaggcttgagccactgtgcctggtcttgctggtgatattttgaagaaacatattcttgtacattgatggtgggacaccattctcatgggggggcaattggcatacctaacaaaattagaaatggtcctagctactcagtaggctgcggcagcaggatcgcttgagtgagcccaggaggttgaggctgcagtaagccgtgatcatgccactgcactccagcctggatgacaaagcaaaacccaatctcttaaaaaaaaaagggggggttgcggggggaaatgtcctcagacccagtaattccacccctaggaatccagcttacacacacaagaaagaaaagataaatgtacaaggttagtcactgcacagtgagacagcaaaagattagaaagaacccaagtgattattgatctgggttttattcctttatagcccaaccatatgatggaatactataatgttgtaaaaatgggttaagagttctttatgaattggtgtggaaacatcgccaagatatgaaagccaaatgcagaaaaatatatgtggtatgctattatctatgtgaaaaagacattactattctctggaaggataaacacaaatttgagaatggtggatatctggggtgagaggtatccttttcactgttctttaaaagttttgatattttggtgtttgcctattcaaaaaaatggttaaaatcagttgccaccaattaaaaattaggagaatgcatataaagaactgaatttcctgtttgtttgcttgttgccttaagaatgtgagcccactgtttttagtgccagatattctaattttaaacaatgagctacataaagtcaagttgctttggaggggggggtcctggtctccaggcttttcttatactcaaattatttcactaatttatttcacttgcctagcccctgtgggcatttgcatttgagatccgtagaaccagagactcagacaatgggaaatttattccaaggatatggagtgtgtgaagaaatgcatctcggtctcagcttaatgtggtggaggatggcagctagatggtcactgcagttcaagcaattggcagtctagctagcacctctgtaccccaattccaaactccctgaggatgaggcatggggtcccactagagaagtgtgtgctgtccagggctctcctttgggaggtgactgataccaggtcagacattgtaagaaagctacaccaatattccacaagaatacaaatgcaaaatcaagaaaatatcaggaaacagaatccagcaacatataaaaaaggattatacgccataaccaagcaggatttcttccaggagtgcaaggttggtttaacatctgaagatcagtgtaccacaccatattaataaaggacaaaaaccacatgatcatctcaatagatgcagaaaataagcatttgacaaaatccaacacctacttatgataaaaactctccttcttggggtaaaaaggggagttcttgggaaggttagaagctagacaggtaccccacaatgtctgcttacagggtttaccaactccttggagatgtttagttgactcaggcagctacaggtttccaggaaccttcctctccatcttaaagcaaaatcccactaaatcccactttgcattatggtgaagagtgcaaacatctttggaaggagttgcaagtagttctaatttcaagcagctgtcacagaatctcctctctgagttccctgggcttgctatgggctcaaaagcctggaaattcttacaggtgataatcagcttgatgcatttcaggcttgcagcagtaggagtgagtggagggcagcaggtctgaggctggcctctgcagtctttgctgggccttctggcagagtgtgctttaaggactgctcatgatgctgggtttggagaagcagttaaggggaggactgcaggggacacaagcattatatttggtcagaatgaacatacggttccccttaaaaaccaaaccagtgaggcatgagcacccgaggccagcctcttcaaccaggaggggtttctcactgggccttccacggagatgctccgttttagacgtaatgggcggagtttcatctggaggagccaggccgaggtgaatgaaagggaggagacctggaggagcgggtcttctgttggcatccccaagcctggtgctgctgcagtggggactctacccagaaggtaaggattccagcttaggccacggtctccttgttgccgggatgaaccgaggagatgttggggcaagtctacactcttgaaatggttttctacatgcaggttgcatctctgagtgtacaggttcttcttaggctgctagcaggtgtttgttgagtggcggggaaaaagaataagtggtctcaaaggaaactgcctggagcagacatactattcaagggaaggctggagcttgtagcccacgttcactgcgcatccctttaaaccagttccgtctgggaatcagctgggccacacctcaaaccaattacatcagaatctccaagcaggggagggggaaacttagatcacctgtctttaaacccccccaggtgatttcagtatgtagccagggctgggaatcacttgcttccaaagaataccagtcaagagatttttcagaacttgcttcgtcttctgagttggagcaattgcaccttttatctggttttcatatggcacaaggcttcctttgaagtgctgggtcctcagcatcgctctgcaccttctgagtgtagcatggaattggttttgaattggtttccggttttgggttgaattgctttcacccgagcttcagagatgggtcctgactagtctaagccaaccagggtaatgctagctcagtgactgaccaggtagctttggactaagcccatcagcttagtcggatgttctggaatggtccagttggcttagaattcaggattctttcttaatactgaatgaaggggaaacctctcaggttaggtaagtggaaggcaccctatgaataccggggtgcctgcctaggatgaagtgtccctgtgggtggcaggatggagacagaaaacctgaatccttggtgatgtccctgagcagcttgccctccccagacacagccagttgcccccttgtcacctttattaagcaccgtctgagctggatttcccgttacctgccagtgagagtcctaattaatataaaagggtctgaggttgggcaaagcaaagtgagtagtcactgctaaaggaagcagagttccctgagcagctcttggagccagagcccaggctgggcttgaagcccatctgtcagcccctagctcagcactatccggcatgctagaggtagcagagtcatcctgggataaggcgggtctgggctgaggctcattttggtgcttatggacctgggaccctgctctgattttccttttttttgagacggaattttgctcttgttgcccaggctagagtgcaatgacacgatcttggctcaccacaacctctgcctccccggttcaagcgattctcctgcctcagcctcctgagtagctgggattacagacatgtgtcaccatgcccggctgaagttttttgtatttttagtagagatgggggtttctccatgttggtcaggctggtctcgaactcttgacctcaggtgagccacctgcctcagcctcccaaagtgctggcattacaggcatgagctaccacacccggccggattttcctttttaatagcgcaagtctcaggcttgcagcctcagcatgcgataacaggtagcaaaaatctaatgtttgtcttgtatttactttcatagtcacttttatggtcatctgaatttgtggcaaattatggtgattttgctttttggtgacatcgttttcctttaaaagggggagtgagggtgaggcatggtggctcacacctgtaatcccagtagtcgggaggctgaggcaggaggattgcctgagcccagcaggttgaggctgcagagctgtaatcgtgccactgcactccagcctgtgtgacaaaggagaccctgtccccccaaaaaagtggtggcgggagttgagacatactaagaacataaagcagttgtgaggcagatgtggcacaactgacaatggtggtggagtgtgagtcagtttggggaacgctgagccagggactgaacactgtgagaatggggctcacacatcttttcattcatagcagcagccaactttcttccaaggccagtctctatcctaggcccaggtgcatggtgtggccggaaataccggtggctgtggactcagatatcccatgtcctagtcagcagcttcccctttgccagctgagatgtcaggacaagttagcttctctgcacctccatgtcagcacctgaaacctggagttcctactcccaatacaaggtttgggggtttttggaggagagtgcggaggattggggttggacggttttgaggactcaaataccttggattccagtgctttacaattagtcccagaactacacatccgttctgaaaatacccgttggttagctgtgtattcacgatgcctaagattcaggtgtttttaggaacaatattgtccttgtagggtgtagcggagccccttgtccggagtcctgtccttgggggagagggttctagttgagcttccccaggggatgctgatccagctttgctggcagacggagtggcaatggctaagtcatgccactgtctcttcctccatctctccaaggcgggatctctacttttgattcctagactggctacttcatgtacacagctgtcacgtcccactgcagtctaggatggcagccagtacagcactcacatcaagtatattggaaaagcccttttacttctgctttatggttcctaaaaggtgcctgctctgcttattagagtatccattttgcttcacttatagtaataagacatcattaaaggtacataaataaaataaggattttttttctttttttttaagacggagtttcactcgtcacccaggctggagtgcaatggcgtgatcttggctcactgcaacctccgcctcctgggttcaagtgattctcctggcttagcctcctgagtagctgggattacaggcgcccaccaccatgcccggctaatttttgtatttttagtagagacagggtttcaccatgtaggccaggctggtctccaactcctgacctcaggtgatccacctgcctcagcctcccaaagttctgggattacaggtgtcagccaccgcgcccggccaaaataaggatttttaattgcaaaaaccagttcaggttcgaatggtcttacaccttaaggttaggtggtgtcctggatggggaaggggtttgcatcacagatccattaacgctgtatgctgaaaacacacacatgcagccaaactcattaaatagcgtggaagatttgttctggaaatgactagggaccttccttcccgcgtcccctcctcttggttggacactttgaaataatgacaagaactttcgggggtgattttgactatatgcaactcttatatgctgactttaaaacacaaccccccctatactgtagctccactacattcaagttacagcgagtagtccgttaccgaagtggtacaagttggtgggaagcaggatgcaaagaattagcaaatggggaccttgctttggtcaagctttcaagccaactttgcagcagatgggagaaatgccttttattttcaaacctgtcaagtttgtatcagctaagatgtttttcttctagattacctcatggtgacccactgataattggtatgttggaatgccatttcctaatggtgggagcagcctcttcatttctagtcttctggaagcttttgagatgttcctccatgacattttggtgaaacatgcctcaactggcacctaattattgctcagcaggggggctggaagggtcacaacaggcagaaaaacaaaacaaaacgctgcctgatactctgcaaaatccacgtgttcaacatgttctacttaatttcattagggaaagaaaatttccatcaagctaaatggttctcaaatgttagtggcatagaaccatgtagagatggatgggcgtggtggttcacgcctgtaatcccggcactttgaaaggctgaggcgggtcgatcacaaggtcaggagatggagaccattccggctaacacggtgaaaccctgtctctactaaaaatacaaaaaaaaaaaaaaaaaaaattatccaggcatgggggcacgtgcctgtagtcccggcagtacttgggaaggtgaggcaggagaatggcttgaacccaggaggcggaggttgcagtgagctgagatggcgccactgcactccagcctgggcagcagagcaagactccatctcaaaaacaaacaaacaaaaaaacgaaccacctagtgataattcttgagtctcatctcgaggactcagtactagtagtctgaggtctaagtagtaaaggaactacacttctgtatggtagtacttatttggcaataagcaggtttgtttctagcgtgaagcatctcagatgggaaactcccatctttaatacatcgcagttttcaaatttggcactcattttgttcatgccagaaatggatgttacaaaggagtaggcattgggatcaaactgacatacaactctagagcgatatgaggcatagataccctttctgcttgaattgcaagagggaatgaagctgtttgataaagattctcctctccctatacaatgacaaggaaccaaagataggatgagaaaatgctctatgtgatgaacagggaaagaagccacagtcctagcttgtctgagtgaactcattcccacgagaaaacctgcagggccaaaaacacgcctccccacccccttcccccgacacccacaaaaacaaaacacaccaaacctctgtaggatacttaggttttctcatgttagaagtgttcagcctacatttacaggcattctctaattaggtggcagcacgttgccatagccaacgatctccagattatttgaaaagcaaacagtagcaacaatattcttttaaaatggcttttattgagacacttgtagggattctgcaacatttccagttgggaatctttatttccaactcttagggtggctaaacccttttctgaatgccaaaaggcacactctcaccaccttaatgaggaaacacacttatctgtgtctgttccgatatccaactgggacctggaccccaagccccgtggtgtcttgtacaagtctcattagtcctccacgtacaactcagaagcctgttaatcagggagggtaatttccaaataaatgtgagctggcctaaatccagctggttatttctgatttggtaatctgtagtatcttaatttggggacatcctgtcctaagttttggctggtgcatgtagaacttataatctacctgtataacaacagatgcaacatagctccgttccagccccaaattccttaaaggttctagtctactcttgcacttcttcctgtactgttgttgagaagcttacattttagggagaggctggtcaaatctctactctctggtaacagcattaacaagagtctttcttttggaaacagactcagaagttatggacatcagccacttcagacttctttaggccactatccttgaggtgactgaccagcctcctcatggattggagtttcccatcattgttttaattgctggaaatgttggcctaattctgcttccttgtaactttctgctttttagtacaagttctcttgggaatctacgcatggtaaaaataccagctccttccatctttacagccctgtcagtgctgtgctcttcaaagcctttcccttaatagcaagagggccaagagtggcaaatagaggcagagccgcctgcactacagttgttcccatcgtaaggtgaaaacgaacgtttaacttcatctagaagaaaaaacaaacaaaaaacccatcaggctattaagattctgcttgcaaattaatgccaatccatgtttacatttttttttttatcattgagacatttacatatatatgcaggctctgctccttaacaaaaggtgaactgaaaaactcaagggtgtttgtttttcagttaaaaaaaaaaaaaaaaaaaaaaaaaaaaaagaaaaacagattttgtaccaggtgcctcaagagaaagcattctatttgcagatgacagatcttgggttttccacaagtttcctctgtgactgtggctgccatctctgatgaaagagttatggcattaaatggcaaaagatataatggacacacaggactgtcatgtgtaataaagcaaatatttacattaagcacaatacagcaatttatttagatgcttaaaatgaatacaaagggaaaataaagatcacaaaattatacatactacaacagtgtgtcatatattagatggtataaatgaatccaccatgatggtgttgaactaaagataaaactaaatatccaaaatgcagcactcattggtttgctgcttcaacacaacacacttttatacagatctaaaaggtgtcaaaattagtagctgcaaagtcaattcttgcatgtgattttagcttaaaagatttcagaaaacagatctgaaataccagtttttgtttttgacagctgtaatgtcaaggatattcagaacaagaaaaatcctataatacaagagagtccagatatatatcttacgtggctggcctctgttgcaagattgtacaaggttatgtgcaaaaactaagtctgtccaaaaagtccatactagcgcagttttgagcttttgctaggtaaactagatagagcgtttattacacagcaagggcaacactaaaaaaagaaatctatgatgggcacacagtaacaggatcatgagcatcacttgaataggtctaaaagactgtacaaatatacatttcaactattcagaatgaatacatgaaaaaaaatcgcttttcccaaagtctactatacacattagactggtagcttgtatgttggccctacactaccatgtgaattagtttaacacttctcaaagacatctgaccaatcatttcacagagggaaagaaatgttgaaaaggcagataaaataaacctctgcttttcctcgtgtgtattcatgagtcaccagcttattggtttttcacatttagttaccgtgtctgtcagagaaggttctgaagcaagaacagcctgtcctgtcatagacttagaaataaccactggaactgcagcggccacatgccccacagtccaaccagtactcacaaggcagtaccagtgagaagacagctttgcagtcacactggatatcagagttccaggctgcagcatgtcaccaacgccagggaacctggcacttaggcctgttggctgctcagtttaactccggctaagctgccatgcatgggctcagctactccatcagtcatgttgtcaaactgttccccatcctcactgtcaattgtgctattctgccactcaatctgggggttagataagcgctcatcattctcagatgcattcttccactgtgactggtccttagaccaaaacccttcaacttttccataggaactattcttccatttcaactgctctctgtcaccttgcatggtagccttttttttggcagctggcttactgctccttgcatcttcgctttgggaagactcgtcagaccaggttcctggtttcatttcgcaggtattgtcctcaaagtctgacacttgttgggatccaggcccactctcagatggagaagcaccgtctttccactcaacaacatcgtcttggtcaacctcactatcagatgcattgtgcattagtttggttggttcctcagtcaaatgaatagtttcgtattttgaaccatcctctttttggtctagcttctcctcagattctgaagcatcctcaggaattaccttcagtacatgttcctctgggttatcgttagagattttaggttcaacttcaaaaacagggtcaaaagggctaccactttcattggattcttcttccaaattttcaaaactgtctgaggaactgtcatcttccttcccaaggttgagctttttgtcagcagtcttactagcattgactctggaatccttctcatcatgattttcaaatagccactcagcatcaaaatccatctcatgcttgactttatttaattctttcatgttaaaccccagcaacacgccaggcttgtacttttcacaatcacggacacacttcttccttttgttactaaaatgggaagcgatgtcactcttccataaccataaactggctgctagcttctcaatttctctcctggtgggatagggctgtttgttgaaatactttgttagaaagcttttcctggcttcataggaatcatcttcatgacccttggggtctaaagctaaaacaacaggctcttcaggcttctcttcaaagaagctgggtgaatcactatcatcatctaactttcgttttttcagtaagggaaattccatttgctcgtaagtgcgcttcacaggtgccagacttggagactgattaagccgagagggtgcatttgtcttatcctggccattttgggtctttccaacgcccctgcagtgaactagatgcagagtgatagttgaggcggtcatgttgctggtatacacaccaaggcaatggatacatttgtaggtgagctttttctcaactggatgaaccgtctgaataacttggtgcctctctcgtaagtgatgtgcaagtgcatcagatatgggtccttttaggattgaaaagcaaagaggacaaagggttttcccaacatcttttttatagggcactgcagcttgaggtgaactttttacagggatatctgccttttcctgaacctttggctgtggctttggaggaactggaggattattttgggcatggtaagcaacagattcagctggggcatccctcagattgtatgtagttaccaggagatggatgttagtgtgactaccctgctgcaatgtcaaatcaaaactcaaagtagaatctgttttaggtcccatctcttcatcaatgtgaaccatccgcatgtgtgcggccatcttttccacatcattgaaagttgaacggcaatatggacaagacagaccatgaattaacatatggttgagcagagtatctgtgggtaaatagcgattacagtagaggcatttgctagtaaaattgtgtattttcataatgtagttggctactgctgggactttctcagctttatgttctttttcgaagtgcacactatagacattttcaggaaaaagctcattacagattgtacatattttccacttttgagttgaggaagtgttacctgggggagggcctgtggcagctgcagcaggtttggaactggactgacctaacactctggatgcctgtgactgagagagggaaggagactttaactggcccgatgagagagaagaggcattagcagactgcagggagtatcttgctggtgcctgggacctctgctctgacccaagcccataagaccttccgtttccacttggaagtaactgctttacagactgagattgttgaggaatggaaactggtgcgttgccacctagacccagtctcattgactgaccaacactgtaaccctggcctacagatttgactccatagttgttctgctgcagatgaacactggacatcatgttgactcctgtagaatttaagttaggctttggtattgagagtcgattcaccatctgctgtgatggtaaagaccggacatttccagaagcaagggaaccgatccttggtgggagtcccatgctcttcttgtcttgaggtttgggagcaattagcatcaagggtttggatcggggaaccactacatttgtgtgcccaatcatggcagtgacctgatagcctatacgttcatggtcttcgatgacatgctgtaccaaagcttcataggactttggcatgaaaaggcatcgcttgcagtgaatactactctcttctcgggcattcgagcctaaggggactgccccattgagtgatttttctcctgcctttgctatgtaaggtgctgccacatgctgaaaatgttccctgtaaatgtgcttcctaactatttcataaagaggatctcggtaagtgcacttcttacagtaataaacagcttgctctacactgtcagcctgcttaggtttaaggccatcatttttgtttttatctttgaaagtgctgaggctgctacttggtgcgctggcgttcggagcatgaaatattttaatgtgtgtttccaaagtctttttgtctgcattgaaggtacagtaggggcaattaaggagaatcctattttcaaagtcttcactatggacattgcggaaatgacttttgtaggcagagaagaattttgaggaaaatggacaagcgctgcagcagaaaggttttgtccgatagtcctaaagtaaacacaaaaactagaattagaatgccacttcagataggcagttaacagattccagatcccccccggatattcttaataatgcattgattttaggccgcgcgtggtggctcacgcctgtaatcccagcactttgggaggctgaggtgggtggatcacccaaggtcaggagttcaagagcagcctggccaacatggtgaaaccccatctcaactaaaaatacaaaaaaataagctgagcgtggtggtgggcgcctgtaatcccagctacttcaggagggtgaggcaggagaatcgcctgaagctgggaggtggaggttgcaacgagccgagatcggccattgcactccagcctgggcgacaagagcgaaactgtctcaaaaaaaagcactgattttagtatgttttccccttttgtatagtaactttataaaatagaaactcaaaaaaaaagctatcttaaaccaaatatttttgtcagtgtaaattaaaaaaatgctaagttctttctcaatgtttagggaaaaaaagtcacattttagctaaaccaaagacaaatgacttgaagataaacattttgcagctagaaataacaagaataacctaaatgaaggaagttactaaagacttcaggtttactatacagtcatgtgttgctaaaccacagggatgcattctgaaaaatgtatcatggtgtgaaatcctcaagtgtgtattcacacagacctagatggtagaacctactacacgcctaggctacatggcatagcttattgctcttaggctacaaacctgtacagcatgtttctgtactgattaccataggcaatgattaacacaatggtaaatatttgtatgtttaaacatagctgagcacagaaaaggtacagtaaaaatacaatgtaaaagataaatgataccatgaacaaagcttacaggactagaagttactctgggtgagtcaatatgaaagcctgggacattactgtacactactgtagactttatgaacacttaggctacacaagttttactaaaaaaaaaattttgagacaaagtctcactttgttgctcaggctggagtgcagtggcacaatcggctcactgcagcctcaacctcttgggctcatgcgatcctcccacctccgcctcagtcctggggactacaggtgtgtgccaccacactagggtaaattttgtagagacagggtctccctctgttgcccaggctggccttgaactcctgggctcgagcaatcctcccgctttggcttcccaaagtgctgggattgcaagccgctgtgccgagccctaaaaaatattttttcttcaataataacctcagcttgctgtggtttatacacttttaaatttttaactttttgactcttttgtagtaatacttagcttaaaacacaaacagattggccaggcacagtggctcacacctgtaatctcagcactttgggaggcccaggcgggtggatcacctgaggtcaagagcttgagaccagcctgaccaacatggtgaaaccctacctttactgaaaataaaaaaaatagctgcacatggtggcaggcacctgtaatcccagctactcgggaggctgaggcaggagaatcacttgaatccaggaggcagaggttgcagtgagccaagatcacagcacagcactctagcctgggcaacacagcgagactccgtctcagaaacaaacaaaaacccccaaaacaaacacattgtacagccgtacaaaaatattttctatcttcatatgcctattctataagcttaaaaaaatttgttttaaaaaaaaactttcccagcactttgggaggccaaggcaggtggatcacaaggacaggagttcgacaccagcctggccaacatggtgaaacctcatctctactaaaaatacaaaaaattaaccggacgtggtggcaggcgcctctaattccagctactcaggagactgaggttgcagtgagctgagatcgtgccattgcactccagcctgggcgacaagagcaagaccccgtctcaaaaaaaaaccaaaaactttaaaaacattttttttcttaaaagctaagacacaaacgcatacgttagtctaggcctacagagagtcagaatcaacagtatcactatcttccacctttacatcttgtcccactggagggtcttcaggaacagtaacacacatggaactgccatctcccatggtaacaatgccttcttctggataactgcagaaggacctgccttaggcttttcttgaggaggtctcacacttaccaagaataagcccacggtgctttgtttccttttttcatcatagatttgattgtaagcagataatgaaccatgaatattcttctctattaataaaaaccttttggtattgagatccatgttttcaaacttttttgttgttgtttgagatgcagtttttttgctcttgtcacccaagctggagtgcaatggcacaatctcggctcactgcaacctgcacttcccgggttcaagcgattctcctgcctcagcctcgtggctgggattacaggcgccccaccaccacgcccggctaatttttttgtatttttagtagagacggggtttcaccatgtcggccaggctggtcttgaactcctgacctcagatgatccaccagcctcggcctcccaaaatgctgggattacaggcgtgagccaccaagcccggccacgtgttttcagacttaaggagcttgctgaggtctgcactgctaaatccttcactgaattttcttgagggttcttcttttgcttttcctgcagtttccttttctctttcctcttcacctatgcgggaacttgttctagttcccacagctcctcaccagtcaattcctcaggaatcacctctaggagctcctgttgtcctcatccacaccccggttaaagttgtttgccatctcaatcacagactttgtgatttatgcaaatccttttaagtcatggacaaacctcttgagtgtattcttccagatgccattcatacactccttgatgacatcaacccaagcccaagcaagattcttaatgcagtcacagatattgcaatccttccagaattgtatcagaatcttctcagtgtctccctaagctgcgacgacaggacaaaggcctttctcagatagtacgccttaaaagctgctgtaactccatcagttggatcaaagaggtggtgtttgatactgggatgaaaaacaccacttaaaggaggcatttgcttatcagcgacaataagcaaaagcttgaagggtatgttattctctcaatactacttctccacttcgcaggcatatctattcaggagggcatcttgaaagaggagcagggtcacccacgacttcttatatctcctgcagtgcactggccaagtgtgtgtgtattgatatgcttgaagcccctagggttctcaacatgccaaatcacaaagggtttcaatttgtggcctgcaacattgcccccaagcaagactgtcatccagtccttaaaagacttgaagcctggcattgctttggtctacctcatggatcaaagtcctttcaggcatctgtttccagaatagaaaggtttcatccatattgaaaatttgttctggcaagtgattttcctccagactcagcttatctagagtttcccaaaattcttccgctgcctttacatcagcactcacaaactcaccactttcccattatgtaatgaataacgattcttgaattgtttacaccacccagaactagcagtcaattcaacatcacagccaggtccagccttttctttcaacacctcaaacacactttttgctttgggatcatcatggtgctgagaggtacacagcaccgtgtgcacctgtgtctgctcttcaatccaggtcatcagaagcttgtgtgtgtctgataaaggcccttcttgaatttttgttagtctcattgccttcaatgaagcagatgctttaacagcttctgtcactttgttcttgttcttcaagatcatagctatggtaaaatgggacaagcctgactggcaagaaataaccatcactgattctccaccttcgtagtccttaatcacttctgtttccaggtcaatcactcaacatggccccttactggcaacattatggattttgtatgcttaggggccatgatgaacaaaataccatgagattaaaccatgcacaagaatgatgcaatcaagagacacagtgaacacaagctgtatgaggctgctaccagttaccatgaaaagctgttttaaaaagtaggagtacactctaaaataaaaagtatatatagtaaatacataaactggcaatacggtttttaactgtcattatcaggaagtcatgtgctgatgttttctgtctagtacagactgcatatgggactatgttcccccaagattataacggggctgaaaaatttctgtcacctagtatttactatacagttgactcttcaacaacataggtttgaactgcttatatgtggattttttccaaacaaatgtagatcaaagatacagtattcttgggatgctcaaaccctcttatacagagggctagcttttggtatatgcaggttctccagggccaactgtgggacttaagtatgcaaggattttggtaatgaggttttttttttttttttgagatgaagtcttgcttttgtcccccaggctggagtgcgatggcacgatctcagctcactgcaacctccacctcccaggttcaagcgattctcctgccttccccgctcccacttccaacctccagtagctgggattacaggcatctgccaccacacctggcgaattttcgtatttttagtagagagggggtttcaccatgttggccaggctggtctcgaactcctgacctcaggcgatccacctgcctcggcctcccaaagtgctgggattataggcatgagcccagcgcccggccggtaatgagtttttaatcattatttgagtgtaccacttacttctatattttttaaaaaaaagttaactctaaaacagcctcagccagatccttcaggaggtatctagaagacgacactgccatcacaggaaatgatggctccatgcgtgttactgctcctgaaaaccttccagtgagacaagctgtgaaggtggcaatggtaataccattgatcttgaccctgtgtaggcctaggctaattatgtctgtgtcttagtttttaacaacagtttaaaaagttaaaaaaaaaaaaaaagtttaagactaggaaaaagcctgtaagcatatgaagacaaaatatttttatacagctgtacaattttttttttttttttttttggagcggtagcaagattcattatgaagagtgaaaggacaaagcttccgcagtgtggaaggggacccgggcaggttgccgtgtttgtgttttaagctaagtgttattacaaaagattcagaagttaagaattttaaagttttactttttatgtagcctaagtgtgtttataaagtctacagtgatgtacaataatgtcccttcatattcagtcaccactcagagcaacttccagtcccgcaagtgcccaatataggtgtaccaatttttcttttatattgcatttttactgtaccttttctatgcttcactatgtttagaaacacaaatacttaccattgtgttaatcactcttatagtattcagtatatagtattctcttatagtaacatgccatacaagtttgtagcctaggagcaacaggccataccatatagcgtaggggtaataggaggctataccacctaggtctgtgtaagtaccctttatgatgtttgtacaacaatgacatcacctaacagggcatttctcagaatgcatcccatcattaagcaatgcacgacggtattatacgctgtaaataactgtatgtgctatacttctatgactggcagcacaggtgtgtttacattagtatcactacaaacatgaatcatatgttgcgctatgatgtcataaggtagcaagtttttcagctcaattatattcttatgggaccactgtcgtagatgtagttcatcactgaccaaaatgtcgttatgtggtgaatgactgcggtaaaattcagggcccacgatgttttagtgcaattagacaattacaagagataaagctatatcttttattcctttcctcattatggataaattttcatagaaaaaaggcaaatctccattttttcctctgattaaagtacagtgtagtatcagattcagcgctgatcaaaagaaagactgatttgaaaagttggctttcttctataagccttgctgttccttctcaaccaagaacacttcaaaagagctaatgaagtaatagctgctttgattcaaatcaagaagttaaataaaaatgtcctacagactgtgaggagggtgaggtatttaaaagccaataatacattatagaatatactgatatcaaagagcaactttcagaattatgattgttaacacctatgcagtcagtcctttgatgaaggcaggtgaactgacatgcttggtaagagattatcttttctccctagaaacctacttgtttcagatactggtttgaaccatgatgaaatactctgcttctcctcaaagctcaactcttctttagtattcagctatgaggctttcagattgataaaactgaattaaataaatgatgtgtcccactggaaagcattctcattctaagactgctggttagtaactttgcctggggtatttaaaaaaaaaaaaaaaaaaaaaaaaaagtcaaatatctgagtactaatttcctgaaaagtatgttccgatagatgaacagatcattaatgcagaatgagaatcactcctaaaataggtaatggtaaaaattaaattgacaattacctctctctatgcagaaggaaatatcacctatatgacatcatcatcatctattgatacttgctggcagtgctaatattgtttttaatgccaatttgtaagaagttttatctctctgtcactgacatcctacagagtcacttccccaggcctcccatagaagttgggtgccatcaacatagggaaataagaaaagcttaaatgtaaggaagggtcttgtctttttctgtgcagaaaaaacaagaatggcaacacagatgcagaaaaatagagccagagcacttttaggggaaatggtgggatacagcaggcttcgtaacttttaagtaacaaaattttgtttcttcttacacctcaagttttagtccaatgacaaaaaaggacaaaaagtttttcttagtcttcccactggtcaggaaaatatgaaatgcaattttgacactttcgatgtttggcacttgcccgcaatcactgcaccgctataaaaggcctagagctgaaaagggagtataccaagcatgctgccatctgaggaagtctcctgtgccacttacctggtttttcgtaagtgatgggtcccacagtcctacatcctcccatgtagtgtttttcaaataaaagtcattaggttcaaattgtttaaaatcctagaaaacagtgaaataagtttacaaaaacatagtggtataaacgctaacccaatcttacatgtaaatctcacctcttaactaagatggggagaggcacaggaaaaccaacgtcaacaaggacttaaactaggagtgataaggctcttaaatataaaaaggcatatggaagttgcagtctacattttatatcaaccaaccactttcctgatggtcagtcaggtttccaaggaaattgctggaagttctaattaagtaaaaaattcagccacacactaatatcaaagcacttttcattagagtactgtactctaactcgtcagttacagtactggaatggtgtctaaaatagcaatgtttgcttacagcactgcaaatatgatttctggttctgtgcaaaaaaaagatttttttcgaggggagggggcaggagatcagatcaggaagaaaactcaaatttcaaacccaaaaaggcagaaagaaagctattcaaagaaagttaagcagtatgatgttaaatttatactctcatgtaaaaatttaatggtccacttccctccagactaggaagattaaaagtcttagggtaaaatcccacttgttcctaaaaagttcacagttcaaggtggaaaatgaagtctacacataaataatcataggaggaacaaatcaaatgcatgacagaaatgtactgtgatgttggtattaattatttctatgaagatgaccccacagagtgcaaagtgaatggactgtttcatttgggcagatctacctgaactctggggttggagaagggctacttccacacttggaacaacgtgactagagaagtcaacttttgagcagcttctgtttccatgccatactcttcaagtattattagtggaactcaaattaagaaaacctgttgtatgaatgaatttgcttttttacttccaattccattcaaacacttactgatcacctattacgtgcaaaacactgtgctaggtgctggggctaaatggataaacaaggtagctatgttccctagccacctagaacttaaaggttagtgggggaaacagcttcaaacatttcttttcaatcaggggctctgaccaacaaaccataagacctggaacagtgagatgttgaaaaggagaccactgcatggctatcccacagagctgttataaagctcatagaataaaacagcttgaaaaacagttcataaagcccaaactgttatacaagggggaaagtaatagtctatgatgggtcaaaaggggcaacaaatgctcaaatcctaaggaaagagacaacaagcacccacacaagcacgcctcaacaattagaagaaggtcaaccagaacattcaggcgtatcagaatgagaacaggctttgagtcccacagacactgccactttctcagctgcaaggctgggcctatttatttgttcttcatctgtgaagtggagataagaactgctacactgcctcccgcctccatggttgttctaaggattaaatgtatagacaactttacggcacctagttcaacgcctgacatgcttaagtcctcaatggtagccttctgcttcaggatgcaaaaatgaaaaagcccattttagggagaaaggcacaagttaatgctattgagaatgttttcgtgaagctactgctgtggctgaaattcagaatcacatctaagatttagccatcttggccactgacacaaagtaatggatcagaagctgagtcatgttaaaatttaaaaatgacatgctacttacttctatatgttctttacagtattccaacccaatgtcactaagtatttttttcacagttttccgggcttttcttaaactgccaagattgttgacaggaagttggaacatagtttctattggaaaaaaaaatttaagtcaaagtcaaaacacgtacaacttgtaatatttactaattccactgatgataggatcataaaacctacccatctgacaaaaaaggtgcatagatatcctcatctagtgtgtacacacacagacacacacctgctttcatgtgcatatggcttgatatatccatccatccatccttccttccttttcttaagacagagtcttactctgtcgcgcaggctggagtgcagtgcactcatggttcattgactgcagtgcactcacgattcaccatagcctcaaccttctgggctcaagtgatcctctcacctcagcttctcaagaggaagggactccaggagtgcgccactatgcccaactaatttttaaaatttttttgtagagactaggtctcactatgttgccaaggctgctcacaaactcctggactcaagccatcctcctgccttggcaccccaaagtgctgggattataggcgtgagccactgagccgagcacatatctactatattttgaatacttaaagcaggcaggcaaaataagtactctctgattttcccagtttttaacaggacattttgactatgagtctaatctggcataattctgataagacttaacaacagttcagtaatgaacttcaagatgaaaattagagaaatactagcaatcaattatttttaaatcaagtgttagtgcttttctcattttgatgttgaacatctgaaaacagaaaaatgcttaccagttcatcatcattacagttttgagtgccagggtaaagaggtttttgttgaattggaactgtcctgcctactgctacggtattctttaaaacaaaaacaaaaacaaaaacaaaaacaaaaaaaccttaagtttctgtatactccccaaactaaatacagtaatgatatgtgactcgaccaatgcatgcccccactccacccctgcctgcaacgtacctgggcaaaggtactcaaaaatgttaactgttacagactttaaggagggtacttttgaaaaaaatgaaaagcctgtatgtgtctaagggaactcaaaaattattttaatgacctaatacattaaattagaaattcatatcaactttcccaagttccttaaaacagaagtttgtctttaatgagaaaataaaatcagtaaaacctgggcagctgagaatatgtatggtttctaatgagatcagaaatgcttcccataatatggtaaaaatttatcaatttaataatccaaatctaacacaatttcgcaggatataaagtagttctaaaacccaaaacagcaaaaacaaaagacaaagcaccaggaattaaaatttaatatatgcaaatccagttttctaattaacaaaggctgttactctgtaataccaatatcatctgtaaatggcaagtcaactaatccaaatgtaataaaatgctgcctcatttattattctaatccaaaatcaacgttaactataaaaaaatggaaaataaaaggagaaagagtgaaatctaccaaaatcaaagagtaacccctagaaattttgaaactgggtacgttactctaacttagaagtctcaaaatattctatatgaagtaccaaagtctaattggggccgaaaatgaaaagtatttcaaaaaaaccttctaggccttatcatactcaagatagaattgctgctcactatgaagcaatgactatggtgtcccctgctctctctgctatgctaataatctgcatattgtgaagccaactacagacttagaagtcacttctgatataaattaagaccaaatcaattattttttgtccaaattttattgctaaattgttttaaaccatcttttgtggtggcttaaaaccagcaaattctttatcacttgcttaatttaaaacagttagtacacactgggcatggtgcctcacgcctgtaatcccaacactttaggaggccgaggagggcagatcacgaggtcaagagatcgagaccaacctggccaacatggtgaaaacccgactctactaaaaatacaaaaaattagctggacgtagtggcacgtgcctgtaatcccagctactcgggaggctgaggcaggagaatcgcttgaacccgggaggcagaggttgcagtgagccaagatcgcaccactgcactccagcatggcgagagcgagattccatctcaaaaacagacaaacaaaaaacacatacagttactacaaaccaggtcttttagagagaagcacatgttagaaaaatatttcagaaatacagaaaagtgtcacaggctaattctgaagaaaccaggtattaaaatggatgcccacagatacctaagactgggaagagacatcttgtttctctgttcatttcataaactctctatgggccaaaattcagttctttgggaacttcctgagttaactctgcttcacacttcataacagatgtgtccagaagccagccattaatggtttccctgcctcctggatgagtggctcaacaatctcagaaaaacaaagacataaagatttggaaatgcagccaccactggggtcattagtctatagaaaacataaaaaagaatcaagcggcagcttgggggaaagaaaaacccattcttctaagtgcctacccacagcttaaaaagtcggtttaagacattaagatgaagcatctcactgcctggtaggtatttttttctgaaaaagtgagtatgcccataagggaacttagttgtaagaaacttgtaatttataaaaagcggtatttcagccacagagttggtgttgggtttacttatctattttgaatttaaaaggcttataaataaagcagtgacactgcttactgggaaatgctgtaccaaaaaatgttatcttgctgtaggcttggcaactaggagaaatctgtattttttttttgagacagggttccagttttttttttttgtttttttttttgagacagtctcgctctgtcacccaggctggagtgcagtgtcacgatcttggctcactgcaagctccgcctcccaggttcacaccatactcctgcctcagcctcctgagtagctgggactacaggcgccaccaccatgcccagctaattttttgtatttttagtagagatggggtttcaccgtttagccaggatggtcttgatctgacctcgtgatccgcccatcttgtgatccgcccatctcagcctcccaaagtgctgggattacagccaccgcgcccggcattttttttttttgagacggagttttgctcttgttgcccaggctggagtgcaatggcacaaatcttggctcactgcaacctctgcctcccaggctcaagcaattctccttcctcaacctcctgagtagctgggactacaggcgcgtaccaccacatcgtgctaatttttgtatttttaatagagacagggcttcaccatgttggccaggctggtctcaaactcctgacctcaggtgatccacctgcctcagcctcccaaagtgctgggattacaggcgtgcaccaccatgcctggccaggaatgtatgttcatgttaactcacgttaacgcctggccagggttccacttttcatccaggctggagtgtagtggtgtaatcatagctcactgcagccttgacttcctgggcacaagtgatcttcccacctcagccccaccagctgggactacaggtgcacactacctagacgcctggctatattttgtgtgtgtgtgtgtgtttttttttgtagagatggggtgttgccatgttgcccaagctggtcctgaactcctgagctcaagtgatctgctggctttggcctcccaaagtgctgggattacaggtgtgcaccaccatgcctggccaggaatgtatgttcacattaactcagaacattctacaactttcagtgtaaagattataatgctcttcatatgcgtatttctgacattcctaataaccttggaaattccataatctccctttctccagaacaaagtgtgccctccatgcatttgttcatggagatcatttctctaagattttctccatttgcagctgaagtaacagtcatatacactggcaccttcaaaagcatttgcaaagatttttctgttttttttttttttttttttgctttaaatacttttctcagtagataaaacaagcacacaattcagaaatataagcaaagaaggcttccttctcactcttatccctccagccacgcagctccccatcccagaaggggccactgttaccctttcttgtgagtgttttgaactataacaagccaaacaattctttggaaaaaagtttcaaccaaactctatcagtcaatcattatgggtgataagaaaaagaagagaaggaccctatgtttctttgcagctactgcttgctgttaagaaacataagttcaaatcaatagctggctccagggttcattaatgttatctaggctgggcgcggtggctcatgcctgtaatcccagcactttgggaggccaaggcgggcgagtcacgaggtcaggagatcgagaccatcctggctaacatggtgaaaccccgtctctactaaaaatacaaaaaattagctaggcgtggtggtgggcacctgtagtcccagctacttgggaggctgagataggagaatggtgtgaacccaggaggcagagcttgcagtgagctgagatcgagccactgcactccagcctgggcgacagagtgagactctgtctgcaaaaaaagaaaaaaaaagttatctatttgattctcctttataaatgtggacaagggatccatacttaagtaactgaggggtgggaacagaatagataagaaattgtctctgcctgaaattcaaggccctttcctcactttcgaatgcaaagagagctaaaaactaaaatacaggtaattattactcttagggagaaagaaaccttaacactaatgccaaaaattgtcccagagatgggttttgacatgcagaaggatagctaatcccttctcttttgcctcattaggatggccattaaaaaaaaaaaaaaaatttgccagccatggtggctcacgcctataatcccagcactttgggaggccgaggcgggcggaacacctgaggtcaggagagtagcctgaccaacatggagaaaccccgtctctgctaaaaatacaaaattagctgggcatggtggcacatgtctgtaatcctactactaggaaggctgaggcaggagaatcgcttgaactccagaggcggaggttgtggtgagccgaaattgcaccactgcactccagcctgtgggcgacaagagtaaaactgtctcaaaaaaaaaaaaaaaaaaaaaaaaaaaaaagaaatcagatgagcatcattattccaacaccaaggagaactagctcccttcagccgaacctttcagctcatgacataaaaaaagaaaaatatccaatttaacaaacctatatattgttcatctgttagacaatcattttcagagcacttgcacttagccactcaactgtgctaggaatagagagatgagtaagacatggttcttcttccccttcaacagtccatttcttccagcttagaatacacatagccagccctcaatcagtagggtttagacacctgtttttgcctgcccagcctcctcttggaaacgcctctgccacgattgatggaagacagaaagtcacttttccagcagagcagagtacacatgactcagtttgactagttaagaatatttcatctatgtaagataatgaccagtagagttggacatgtcccccgaacagggatgacgtgacgctgaaaaggagagttgagacctgccatcacatgaaggaagcaaagggaacaattcctattgatattgtttaaggtcctcaatccagctgtgcccgaagaacagcacttccctatgccagccttttccaatatataaacacacacattatcgtttctgcctaagctaagttcttgtcacccacaaccaaaagtcttgacagacccactgggcaggcggacacagaagagaaagtgaataaataagagggaagatagggtatttatgcaaaataattacacttgtgaactgagtctagtagaaagaacaggagtttgaaagatgaaagttactctaaaaaatgctttgactctgatttcatgaagtaaaaaaacaaaaaacactatatgagaagagttaaacaccctaaattctagaattcagagaaagctcaatgacctattaataacagaattaacatttgcaagtattttatttacgactgaaagtaactaggtgtgggtgcaatgtctcacacccataatcccagcatgttagagggccgagttcaagaccagactgagcaacacagcaagacctatgtttctataagaaagcatgggtgtggacctgtggtcctagatatacaggcggctgaggtgggaggatcacttgagcccaggagttcaagactgcagtgggcaatgatcgtgccactgcactccagcctgggtgacagagtaaggccctgcctctaaataaatagagagtaactagctttttggtaagcacatgccatctgatgaactacatgtaaacattcaattattattatttttgagaaagggtctcactctgtgttacccaggctggagtgcagtggtatgatcacagctcactgcagcctcaattctccaggctcaagcaatccttctgcctcagcctcgcaagtagatgagactagaggtatgcgccaccacattcagctaattttttaaaaaaatttaataggggtcctccctatgctgcccaggctggtctccaactcttgagctcaagtgatcttcccacctcggccccgcaaagtgttgggattacaggtatgggccaccgtgcccagccaacgttcaattctggagactaacactgttgagtgaactagccatactcattcctattagtctttgcaaattatacccacatctactgattagggcccaaacattaacgttttactaatccaggcccatatcctattcatgtgctttcttacaaagcaagagtcagacagctggaatgaaaatctaagattcatctaggccctaggctacagataaattaaaaccatatgcatgatatttgtatctgtgcagaaactttttcagtttaagtcccatctatttttggttttgttgcttgtgcttttgaggtcttagtcatgaattctttgcctagaccaatgtccatgagagtttcccccaggtttccctagtttcaggtctcactttgagtcttttttctatcttgagttgatttccgcatacggtgagagataggggtctagtttcattcttctgcactatggcaatccaattttcctaccaacactaactgaaaaagatgtccttgtacattatttgggtgatggatacactaaaacccagatttcttttcttttcttttttttttttttgagacagtttcactcttgttgcccaggctggagtgcaatggcatcacccaacagatgacagtcccagtttagcaggctcaaggtaaagtctgcaggatctggcacaccaagaattagtggagcttgtctatggtagttctgcagagctaccacatcaaggatggcaccatatagtctgtatttttacgggcagaaaaaaagcagaaaagcatttactagtatcatctgaaagaaagacaaaacaaacaaaaagataagcctgttttagataagcaaaagacaacccagctacctctgaacaggcacagataagccagaagaaaaagctagcctctaagtccaacttgtccagattacattttaaactactccaagtgaggatctagtgtgtcatagtgtgtcctactttccttcaactgcaggtgtaaactttgctactttataatgttcgggaaccaaaacctgaacataacccaaagtgatgactaatgtatcagttacactagtgaatgcaaaactttcatttccactaagaaaagcatatctaatattgcactgagagctacacaaggatccttacttcttcctggttaacacctaaacataagctgcacttagcctaaactagtgattttcaaaccttattttttttgagacggagtctccctctgttacccagtggcataatctcagctcactgcaacctctgcctcccaggttccagcgattctcccacctcagcctctcgagtagctgggattacaggcacgcgccaccaggctgggctaattttttttatatttttagcagagatggggtttcagcatgttggccaggctggtctcgaactcctgacctcaagtgatctgcctgtcttggcctcccaaagtgctgggattacaggtgtgagccactgcgcctagcttcaaactttttattttttaaaagctgtgaaacccgtttccaaaggaatcttaggtgaaatataaaaaagataaaaactagaggtgctcaggttgaaagaaaaaaaggttccctgcccccaagtacctccacgaaatagttactcatctaaactaagcccatgacgcaaatttatgcaaaagtggcaggttactgaaatgtagaatctgggcctagtgggcaatcaaaccaaagcatgaagtttgatggctatagcagaattctgatagtttactgaaaatcttcaccaattattattagtctgatcaaagtatgaagtgatagggaatccacagtaaacctaaaggatcagaaaataaagttcacactgtgatttttaaaaaaacatttctaccctaaagttgtaaagaaaaacacagtctctctgggattatcttttacctggggttgggagaagagaagagtgtggaatcaagggctaggaatgacgctattactagtgaagaaaacggcagctgtcaggatgggcgccatggctcatgtctgtaatcccagcagtttgggaggccaaggagggtgatcacttgaggccaggaattcacgaccagcctggccaacatggcgaaaccccatctctactaaaaatacaataaaattagctgggcatggtggcacatacctgtaatcccagctatttgggaggctgaggcctgagaatcgtttgaacctaggaggtggggattgcagtgagcagagatcacgccactgcactccaacctgggcaagagtgagactctgtctcaaaaaaaaaaaaaaaaaaaaaaaaaaaaaaaaaaaaaaggtatctgtattttctaagttaataaaaattaggaagacaatcaggctactacaatataaacaatttcattttttgataacatcaacccaagttactatgtaagaatttcagatccttgatatttaaattattccaattgatgctgatgcaagaatttttatatatctcttataacccccactggggtttaagagtaagatttttgaagtttccttaaaccaatgatctaactaaaaaatgttaagttatgctggcaattttctaagagggacaagcatttgactctcatgaacagaatcaaagcatcagttaactgctacctgtgacgataattttatttatttaaagaacagattttgttatgtctctgtggaaacatttagtacctgttaagataaaaactaatcagaaagaaaacatcaatcctgggaaagcaaaacagacgggtgtgtgtctaaacttatggtctgcaacttggcctacagagggaagctggaggaggtgaaggagaggattctggccaataaacccctggctatgagaactgaccaggacagaagtgcattgcattgggcatgctcagccatacatacataaattattgaatttttgtttcaacttggagtgccagtgaatgataaagactatgcgagattggtctcctcttcagactgctgtttgtgctggccagaatgagactgtaaaagcccttctgggaaaaggtgctcaagtgaatgctgtcaatcaaaatggctctactcccctacatcatgcagcttccaaaaacaggcatgagattgctctcatgttactagaaggtggggctaatccagatggtaaggatcattatgaggctacagcaaagcaccaggccacagccaagggtaacttcaagatgattcatatccttctgtactacaaagcatccacaatcatccaagacactgagggtaacactcctccacacttagtctgtgataagagtggaagaagcaaaactgctggtgtcccaaggagcaatatttacatagagaataaagaagaaaagaaaccccacaagtggccaaaggtgccctgggtttagtactcaagagaatggtagaaggttaaacagcttggatttcttcttactttctatgttgtgatgctgtccccagtgtcctggaaactaacatacttgggcacaggacatcatctacaaatgttttctcaccttcaaagtcttataaacatgttgactattgttcctgctgaggttcttattctaaacttacggcttgctttctgggcactgagtaactgctgactgttctactgttgtcacatattcttgtatactgaatttcggctaattctgagtaagtgattccgtggctgttgttaatcttcagcaacctccgagcatgcaccttgtatcagtctctgaaatagaatagctccaatagcaacaggctagtcgttctgctagatggttctaggtggactccgtgatgttcctccatacagttaaacatcctaacttgtttctcaagctcactcaggcctatgccagacagttgtttttttccccaaccatgagattttatttttgtgataggaggaatatttacgtatttcagtggaccaaattttaagttgggggttgtgctagaaaataatgaaaaacaacttcccatgtacacgtgtattttttttttgatgagctatttgccaagataaaacgtatggttttttaaaaaggaagttttaaagtacctatatcgagtcagcttacattgaaaaaatgtcaagcttgttaaaatgattatgtaacaaaatgtattctgatttgtatttcagaaactaaaaaataaaatgttgaaagaaaaaaacatcattcttgtatttgtgcattttctttccttcctgcctttacctcagcaacatatttaatacctgtctatatcactcattgagtcaaaaactgtggtcacggtaaaaccctatttcttcttatagccaataagcccttattcttcctattttaggatttgcatctgaagtagtgaacatactttatttgctttacatgtgccattaagccctacatttaaatcaaaccagttgcaaaaaggtttatatatttgcattttaaaaaattaatcttacacagctttaagattgagagcctacagccagactggaaacaatcaccccactcaatctttttctaaaatacaccgccctgaacagaggtagctgatttccattctcctataagcttgggcaaaagagcttccagatgccggaaactcttcatagaaaggcagctctgatgcctcctccttttcctcccctccctccccaatccacaaaacacgtaattctgactatccaggggcagaatgttcttctggattagcagataaaactgtgcagcaagacagaggtaagaaaataaagtttagtatcctctttccttaagtttactagaaaatgtacagtagtactgaggctaaaaaggggggtgagggaattagagaaccaggaagataagaaagaaaactactttgcaaatgatgacacacgtatgtactgaaagctaaatctgaataatgaacatcaattatattgcctaggataatcatattataacactcttaataaagataagcaggcaggaaatgtaaccagtttctgtattcttctattcttactaacttcattggacttttactattctcccagtttgataataaaagataaccaaatacaaaactgcctccaaaaataaacactgattttcttcaagtttttaactgttatcaattatttatattttttataactatttctttagttaggagtgtaaatttatgcaaggcgaaagatggtatttatctaaatatagcattctttacaaaaacgtttagtcaaagtaatattttttgtcaccttccatcaacatgtgtgaatcctttctacaaaaaaaaagatgctctgaaagattgttgcctgatcacctcaagtaagagggcgcacaaaatcccatcaggcagctcattccacactggacagcttctgttcacaagtttatgctttacaacgctgtgtaacctgcccatagctctcaggctataaattccctagtcacatgacagcctttcaaaactttaagacacgcccctcttctcccagttaaccaggatcagttcttctcaccattccttccatgatctcataggccactctccaaaggataagctccagcttgtcagtctccctagttccctggataaactgttattcggatgtgacatattcaggagatggtcgagtgagacaacaatactctaattctggacattatttttcaattaatgctcctgaaaaatacatttgtgtcagtggcatccacttcatacatatgacataaaaaatatttttaaaaatatgcagtgccttttcagaattagcttgttcagctgatgaggaaaaagatagtttggatggaatctaagtaacaatcaccagtcttcagggtctcctcaactgcaggaacacaagcattctgtttctgaaatgagggggaaaaacaaaacaaaaccaaaaactaaaaaacaagtgtccagtgcaggccttaggaaagtcaaaagattgagattcatcttccaaatcacaccatcaacagaaatctgttatgaaaaagcagcactctcaatcactgaaagaacctaggagctgcctaatctaaactcttctcatcctacaaattagcagctgaggtgaagcaactgcttgcccatgagcgagctgggtcttgaagccaccctccagacctgagatgcagcactcctgtcactacccatgcagaccaaactctatctttggcattcactaaaaacaaacagcagcatgttccctacgtacatctgaaagtgccagaacttcaatacccaaggttgaaatggtcttcaaaaattaaaaggctcagccaaaccagctgaagcagcaacacagaaattaagaatctgtacgtatctcaagtcagtcagatgattccatcacatccagagaagaattcagctctaaggacacttgtcttaaatcactcttaccatcaccatggaggccaagagtcactagatagtcacatttgaagaatctctttctatgcaaatcataatggtaatatcttgtaaaatgaaaaccacaaccttggtattcttaaataacaggccagcttttcaaaaaacagatgtatcctatgtctcccctttattatcttcccattgtgaatactctaagcatgttcttctgaaagtcccttgggaaactagacgcttcctttttttcaaaggagggagttggtaggagcctggtctgttctcaactacctccaggctccagtcaaactgggagaacagtaaaagtccaaaaagttacataagcaattgggaagcgggaacacaggaccacacataaactcgtgtatcaatattctcagcagtattattcataatacccccaaaataggaacaactgaaatcaactgatgataaatgaaatgtggtcatatccacataatgggatatgattgaaccatgaaaaagaataaagtaccgacacatgttccaacatgaaccttgaaaacattatactaaatgaataaaatcaatcacaaaaggccaaatattgtatgattccactcatgaggtacttagaataaacaaattcatagcaacagaaaagtaaaatggtggttgccaggggctgggtaaaggaagaaaagaggagttattgtttaacaggtatagagtttcagttctgcaagattaaaaaaggctaaaatggtaaagtttatgtatactttacaacaattaaaaataaacacattctttttttttaaagtggctactgggaaatttaaggcagcagtattgattagggaaggagacaaagtctgcttataatttcaacagcagggtggtctgggttcaaaatcaggggcatttatcactgatggatctctttaccaaaatgtgaatcttaagcatttgttaatattacccagaaaaggagagaacctctagaacaaaccgtggatgtaacacagcattttgaaggtctatacaaatttccagaccatttttgacactataatcatttaatatgagtggtaatacattaatggaacctaggtggccccaaaacctttaagtacttaaagaaaaaaaaatggtagagtgttcacgttattggcaaatctgctccactccaagaggccaggaacaggatattatattacttttggcaatgaaggccctgattcactctgccttaactaatagatttagtacagctgggttacttcagtgagacgttcaactaccttgttttgcaaacttgagcatgtggcagtagagaaaagatcttcagagaattcccatgtgttaaaatttcaaattaccttcagtttccgctacaaaagtagaagaacaagaggagaggtcctgggaaaaatgaaatggaaagcttttgaaaggtaacagaatgatgaaaaatttaattttagcactttaaggaagttttgttttctctcatgctggtgtagttcatttatagcaaaccaacaatctaatggtaaataaacagcctggttcatcacattacctaccaattatacaaaaattataatcacactgtgacttaaaagttttatttattttaaaagttcatcacaggtgatttcagagatttagtacaatatcacctgaaatagttaacagacacggctggcatttatgtctacaaattattatcattacatattatctttcagcacgttcattttcctgacctcaattgatggactaaacagaactcttaaaatatgcagcaggacaagggtgccatctcacaggtgtagctcacagctcccagcactttggaaggctgaggtgggaggattgcttgagcccaagagttcaagaccagcctgaaaaaatacatatatttaagtgtatatatatatatatatatatatatgtaaaaagccaggtgtgatggtgcatgcctatagtcccagctacttgggaggctgaggtgggagaatggcttgagttgcagtgagctatgatggtgccactatactccagcctgcgttacaaagggagaccctggaactttggtttttttccctgctgtatctctatcatctatgtcaatgactagaacaaagcaggcactcaataaattcagacagaatgaatgaatctctgcctagaaaaggcttacagatatgacatccaataaatatttgcagtaaaagaggcgatgtatcagatgtgtcacaaactaaatcctaggaggcttcatgtttagttcattctcagcagggagggtggcaacagctgctgagttggggccattaacttaggtgaagaatctgcatttactgcaaaagacttctggcgcagttccagaggccggaaagcaaggtgttctaggaacttcttgctcaactccactgagtcagaatggttgctatgtcaagcttctgagtaacaaggaacgacatgattggaaaggcagggtgaggataggatggggatcttgaatgtgaagctggagtctgctgccatgtctggtaggcaccgaggagatgctgcaggtaacgaagtacagaagggacatgattctaatggcactttaagaggattaatccaggccgggtgtggtggctcatgcctgaaatcccagcactttgggaggccaagatgggcagatcacgaagtcaggagctcgagaccagcctggcgaatatggtgaaaccccatctctactaaaaatacaaaaattagccgggcgtggtggtgtgcgcctgtaatcccagctactcaggacgctgaggcagaaaaattgcttgaatccgggaggcggaggttgcagtcactgcactccagcctgggcaacagagcgagattccacctccaaaaaaaaaaaaaaaaaaaaaagaaagaaagaaagaaaaagaaagcagtggctcatgcctgcaatcccagcactttgggaggccaaggcagacagatcacttgaggtcaggagtttgagacaagcctgaccaacatggtgaaacccatctctactaaaaatacaaacatgagctcggtgtggtggccagcgcctgtaatcccagctactcgggaggctgaggcaggagaatttcttgcgcccaggaggcagaggttgagatcgcgccactgcactccagcctggactccattaaaaaaaaaaaaaaagcctggaggaagtcaattaagtaaaagagtagataccagacctacccaaccctcagaattacctgagggaccttacacccatgccacatcttctcaatctaagaggtctgagaaaccatcactgccttaggtatgagataataggatactggggtaagagtaaaacgaggggaaaagaaaaggttcacaggtgaagcttatagcctaagtcaaaatttgtgctaataatactattttcctggacaaaaacttacctatcagccatatgtaaaaaatttgtaccttataacttcaaacctccttaacaagaggtagggtgacatagcacagtaaagcttttctttgctagaaaataaagatgcagtggtccaccctacagttagacagatctgtatttaaatccttgctctgccacttacaagctttgtgatcctacacatgttatttaacctctagaggtctgttttcttatggcataagcagaaggacactatctcattgttttaatggcagaaggattaaatgagatgatgcaagttaatgcttaagtcagttaccattatcaccttaaaccagatgagatactaaaataatcactttcaaaattctgagttcacaccagggcataacctctccaaaaagctcaaactattatgactgagaatcagatgtggttgccataacaacatctgttcctgtacacattacaatgcatcatgcacagtagtgtttttatacaatattttacatctgtgtgagccattcatactcaggtttgcatattcttaacaagctcagtgacacttaaaatatttaggcaactgaacatctgcaactatcttaaataaacccaggtgacttacagttatgtagaaacataaaggtgtcatctagattttgcgtatcttaagttttaaaaaatatgtggagtcactggtcttttaggaagattttcagactacaagactggtgcccacaactggaaaactgctactgtgttgctgcttatcctgatactttccgtattcagatttcaggcaagaattctagcagtgaccaccagaatttccagtacaccagtagaaccagttgttttcaggctgaactcctctaagagtttaagatatgtatacaaacagagggaagatgatgcctgagggacaaggtgaaagctgggcagccagaggtctggccccccgacccttcatcaatttaagagttcacctaaaattgtatttgaaagcgggggaagatgcctcggtacttaaacaagaaaaacagactgaggatactttataatataccaatttagatttagggagagtgtgaggtgaggagcacttcccagtttacttcactctaaacaggtattgcagcaaggcagggacacagcataaagagtgattctagcactccactgcctacataagaactccacaggcatacagccacttgctgtcgctgtaagtggacaatctggcttaagatcaatgtgaaaaagggaaataattcacaagtagcccttaaggggtgctttaggggaaaactctcaaactttgtttttcctctgccctcacaccacacagaagtcgtgaagttgtcttctgtgaccaaacgtgtagggttttttcccaagcagcggacaccagctgagtatcctctaatttggttctgacactgtctacctggatacagtgtcatattccacaagatgggggctcagtccccaaaactgctctctccttcttcagactccaactgtaagtctgggcctccagaacttctgactgacacttcaagctggggttcccaagaccccctccttgagttctattaatttgctggagcatctcacaaaacttggggaaacacttatgtttaccggtttattataaaaagtacagataaagaaatgcgtaagggcactgggcttccataccctctctgggggcgccaccctccaggtgtgttcaactatctggaagctctctgaacccagtcctcctgcgttttttttttttttttttaaagacagaatctcactctgtcccccaggctggagtgcagtggtgcaatctcgcctcactgtaacctctgcctcccgggtttgagcaattctccagcctcagcctcctgagtagctgggattataggcccccaccactaaacccagctaattttttttgtatttttagtagagatggggtttcaccacgatggccaggctggtctcaaactcctaaacttgtgatttgctcgcccccagcctcccaaaatgctgggattacaggcgtgagccaccgcgcctggccctcctgggtttttataaaagcttcatataggaaaccttacttcccttccccggggtatagggccaacaccctctctctagagaggatctcaagacctacaatcagaaagctgggtaaagatcagaatcttgccttgggacacgtgtaaggagagcaggagaagatcagagattattttctgagacctaacgtaccctatattataacaaaacacggtaatggggttatgggtgttatgagccaggaaccgtggtggatgaaaaccagtatgtatcacaacaccacaagaggacacgcagatatgtccatttataaattatttcagaagcatgccaagtctttgtatctaaatgacataaaacgttattttgatcccctaataatacatttttatgctctaccgaaactactcagaaataatttcccacaataggaaatatatttctttcactattcttgagtaacagaatatttaaactatgttctcaagtttttcgaagccatttcccaggatcaaggcttcaccgaaggtagcttttcaaaagcgttcttgtaccaggttttgccacttgatggctcaagttttcacactttcctcagagaagttttatttgcattttttttggttgctgttttttatttttatttttttttgagactgagtctcactctgtcacccaggctagagtgcagtggtgccatcttggctcactgcaacctccgcctcccaggttcaagtgattctcctgcctcagcctcccaagtagctgagactacatgtgagtgccaccacaccaggataacttttgtatttttagtagagatggggtttcaccatgttggccaggctggtcttgaactcctgacctcaggtgacccgccagccttggcttcccaaagtgctgggattacagatgtaagccaccgcacccatcctcttgttgctgtttttaagtgtaactgatcttgaagcaggattctgagcacttcttgcatttggatactcccagtctcagctcacttctttcacaagagcaaggattctgtcaacctaaatttataattcgaattgaaaattttaataaattccaccatatttccactagacaggagtttctcaaaagagaccactcaaaaggttctcaggtcatgagcttccaccagaagagcagagctttacagattgtcaactgaagcacaggtttccacaagctcttaaatggagcatgaaggattcagaaaaagaaagggtaaaagccagcaattatctaagaaaaaagtaactgctcaggacagactgactgtcttaaactaaaaaactgggaaaagaaaagggaacataaacaacgtttctttttagattcttatacagttaacttcccagcagaaatatgctactccaattaactgccacctgcacaatttacacccatactctccctgctgggggtgtggctagcttctttacatgtagacgccattggaatccttgggtttaagctcacatggaagcataaaacctcactgtgaaatgggaagcattcatgtgagcccccattagccaaacagcttacaagagcaccataaaggcctgtgttgcaagcacaggcctgggaaccagcccagacatactctgtggctcatttcatcattgtatgtggtagtgccttgatttccctacttgtgaaacaaggatagtcctgagaaaattgggaatagtttataaagtgcttggaaaataaaacagacaagccaccaatactataataccataaaggccagcaagggggcctttacacttaagcagcacatccttattaaagtcatcacagtcacatgagaagtgacatataaacacaacccacagctaagtgactcaattacaaatctatacccttactgaagagggtattaggatatgcagattcatttttaattctaacagctggtcaaataatgcatgactcttttagattacgtgtatgcttttaaattaaatctttaacttaaatctaaaactgtggcatatattcagagcaggcttccctttgtaaactccatccaacgttgtctatgctttcctcttattttctaaatctttatttccagaacactgctgaaattcttgagaggttccaggctttctctagctgctgtcttggaaccaaggtagggatcaataataccaaagcttgtgagtgaaatctcaaggaactccttaaggcagaggactgaattaatacacagagatgacaggacccaggactaaaaacagtaatatgaattttgcatttttcattgattagaataaaaaaacgtgtgccctgcaatcaaaactgtcactttccacagttggctcaatttttatctgtgacttcctatacacacacacacacacacacacacacactacataatcaagttggctcatatataccaacttgagaagcatgataatatgtgaggagagccttctcattccagtgaagcagaatatgaattctcacttaagctgaccccaaaactggcagatcgcaaaggtaggtcataacataacgcaggtgtagggagtactaagacactgagaggatgaaggaacataatcatcctctcctcactttctaataaacaggatcagacaaacaacaaaaaaccatgaaatcacaatggccacccacaatgggcaaagcatggacggtttatcaaataaagtatctcaacaatcaaggtggaaagtgccaaagtaaaaacaagaaacagcttttacattcaaagtatcaattcagttaattagcatggggctttggtttatactagtttcaaacaccgagtttccaaactaacaacatagaaggtgttaactggcagtgaggtacatcagcaaaatacggcatttactccagttactatcacaagctcttacaaaactaggagaggggctgggagcggtggctcacgcctataatcccagcacctggggaggccaaggcaggcggatcacctgaggtcagcagttcaagaccagcttggccaacatggcgaaatcccatctctactaaaaatacaaaaattaaccaagcgttgtggcaggcacctgtaatcccaaccactcagaggctgaggcaggaaaatcactcgaacccgggaagcagaggttgcagtgagccgacattgggccaccgcaccccagcctgggagacagagcaagactgtctcaaacaaacaaacaaacaacacacaaaaactaggggaggaaaaactttaagtttatacgatgctaataacaagtcaagctctgtgaatccaactataattaaattatttacacataggggagcaatgtttctcttaatgtacatgcctctcagtcaagagaatgaaggttaaactcccactgaaagttattttaccttatgtaagacataactgactttatgatgctcttttaaaaactcctttggaactccaggttgaacaagtagcttatttacacaacagtcatgggtactttggtgtaaaccacaataatgcttctaatgttgtaaaataaaaacttcctatttttttctttcatattactttaaaaatctttatttcactaagatttaaataggttacttggaaaaaatacatacataaagtttaattctggtatttttttactacacttagatgtattgtccccaaactacatctcaaaactaaatgtactttccccaaactacacgtgatacttgaacttttcatctgtatttaataatatgacaatcatttccagctctagaaaacctacatatattttatatgtatgtgtacatacatacacacacccaattgtgaaatcaagtgacctaggtctattgcaatttatgcagttttgttacttatatatgattctcaaaagaagaaacataaatgctgaagtttttcttttttttaccctatgaagtatcaatctctactttctcctttacaaaacagctttatcttccttattaagttgcaattttcaaaataaaatttgtagccagcatcatcttatttaatcaataaacttgagtattttagttttcaaaatactaactttttaatactttcaaaacgtgtaagtagttacaaggaaagcaacaacttcacatagtatgccttatatacctatacttttaataatcaaatataaataataagccatttttgcctgataaaagcctactggttggttacttgcaagtggtaccaaaaccatctgttcaaggttgtgaagttcttattttaatataaatagtattaaaactcttcctgcactctggtataaggagaaaaagataaacttaagcaaagcaaagcaaattcacagtgggcatgtataaaatcaatgacttccaaggttggaagggccaagggtcattaagagattttcagcccaatctcctatattttctatacaggaactataaaaaccaaaatcaaagaggttagtttcaatatatagctcctaataagctagtctcaggaaatttttcaacaaaggccaagataaaaaaggaatttctacttaaagttcagttaaacagaatacccattccccacactctagttaattgaaccttttactatactttaatgaagtatatagtttacctactataaattccagtcttcaagcccaattgtttcactttttttttttttttggtagagacagggtctcattatgttgcccaagctggtcttgaactcctggcctcaagtgattctcctgcctcagcctcccaaagttttgggattacaggcgtaagccacctcacctggcctcaccttattttttgagtgttaaaaccaagaaacctttgaaacagtagaatacatgctttctaagagctcacagcaagttttcctttaagggaaaatggctgttaccacttaggacatcattcaacactgtatcccattcgctaaatcaaacaaaagcccctcaacaaacttcatttcaaacattccgtcaaataagttgtcttcaaattatatggtcattttcagaacttaaataactgcatataaaacaccaaataaagataaaaactatacctgcctacaaatactatacagtatttaaaaatttaaataatcccatttaaatatgtgatttttcacaatgactaagaaattgtagaagcaatgtctctagtcaaatacctgtaccaaagggcctccttttcactcaccaaaatgttacctggtagcaattctccaatgaaaaattctcctgttaagcaccaactggttaactaggtatcaaagaatacacccattcagttctccataaacttatcttggtgtatttatgtaacatacaaagtcttaaaggtacccacaaacatcaaccactgtcaatctttggtagcaagaacaagttcatggaaaaccatgttttcatcagacatttaaggcttttagaagcttagcaactctagagattgggttatcaaagtaatagtaactgaatacttatactttatacaaaggggtgtagaatgcaaatgattacaatattagcatctgtaaaaatttctcttaaaaaagctgtaagtaatttcttatgttaataagtgttcagaacccactactgcaaccagctctaaccggttccttgaggaatgtggctaggctgaaattttggaagtgttggttttggtggtgaccaaggagaaggaagtctctggcttccctgttgctgcagttcccaccctccaaaatgaatatacccaccggtgtgaattgacaatgtggtccaaagagcaaggcaggaaacggagtccagatcctcaaaatggtagtacagggcataaccactaggccacctatcagttcagtacaaaaagtacaaccctgcgcatcatggtgtaaaagctggggcctaggtttcgcattgtgcatctcacacctatggaaataacaagaggagtaaaatctatggaaatcaacacaccctaagaaggtgggtgctcacagaagactggtatcaacatttttgtaaaggtggttggctgctgagataatgaatggcaattacaagtccaaatttggagggaaacgaaatttttacaatcaacacttgagttcgacaatgaagaacccaacatgggcttgatgtttaccaacaaggctttgcaaatcatgacacccatctacacacttaatccaacatctctcaagaatgatttttaactctcaaagaattggaaagatttggcctatgaagaagggagttaaccagctatgcccccaaacctgttactttgtttcaaaccttctcctttaccaccagacttaggaaagatatggtgacacattcaaaacttgaggtggaagaactccagaggaagggaatccgaaccaaggatgtgccaaggtgattcgtcaagaacaaatatggactgggggccaacagttttgaaaaagtaaaaggagaaaacttctaaaatgcagggtgggctctttaaaagaagtaaaatcactgctcttgactcacttaatccttcgccatgttgctgtcagctcaccaactaagagtgcgagtgtgtcttgctgggcccattttcccatggtctgtagaaggcgctgtgaagcacatcctgttctagctcgggggcccttcccccctctgcagccttacccagtgcagagaatgcgccccctactgactccaacactcatcgcctttagccgacttggctgcggtgcattttgggtgggggctggtattttctccatggccataaaccagaagcaacaatgcagatttctaaagaaactgtatcaagctatccaagagatttttttttttttcattctgaaggttcaagatacaggcacaagaagcatcagggatgggaactgggtgtgtggggatggacatcattaacatgacaaacacagaaacagtttggttctttttccctcctaagcctttgtctgtgaaatggggttatggcaagaagtgtccagagtaactggtaaattcaagaagattaagaagacttcgtgtgtggggggtgtgtgtgtgtggctaaaaaggatatcagacctagagtcttggtcttgggcagaagaggaagagaagcaatcgcgccttttccagcagacagggatcaaggttgggggggaggggaaggcaggcaggcctcccagaggaaagaagaggtgaatacgagtgtgttcacaaaactactccccattcattacattaaaaaaaaatctttttgcagctctctggatttccattttctaccaccttactgcaaagttggggctcagaatgttcgaaagaggtgctgaccaggcagctgagattggggaaaagggatggtggtgaactgtggtcaggataagaggaaagctggcaggttggggaagaaggattgcacaggggaggcaaagactcactccatgccatgcatgctccccgccccccccaaccccgtcccccctcccccaggtaagggtgggcagacctggcagaaggctggttcaaggcatgggggtgtgcgtgggggggctccttttgggggtggggggcggacgggattagttccaggatgggagaagctcggttctggctgggggagatgcccttagctgcaaaagctccgggcggccaggcagagtgctggcctcggtgggctcacagggcggagaagggggtcgggctgcaggaggaggcgcctggacctccggagcagagtcgggtagcggtccgtgccgggacgggggacccgtcggcgccggggtgtgcaaaggagcgtgtgtgcggctggagggcggcgatgcgaacaacaatgcgcccgcgcccggggccaggctgcactggcggccgcgcgggccggggtcgggaagccaggcagggcagggccgcgggtccgcgcgcggcggcgccgggcttaccttgactcggcctcgaggcgcgcgcggggccggcgtgctcgggggccggacagcggcggcggcggcgggcggatggcggcggcacggcggtggcggcagcggggagggcgcgcccggggcctcgtcgcgctccggctcggcggactccggctcgcgccgcggccgcgggtgctgccggggggcgcggcgggcgcagcagagcggcgggcggcggcggcgtcgtcgagcggtgcagacaaaggaggggcggagggaggagacggagggtgtgggagaggcggcttcaccggcgcgggcggcggcggccgcgctcctctcgctcctcagcagcggggaccgagagagggagctgtgtctgagaagacgccaaaatcccccttagcgctgcctgcgggagggggagggggcacaagatggcggcggccgggggggggggggcgggagttcagctcatggatcccggcgggcggcggaggggagaccgggccggcggaggcggcggcggcaacgggcgggggagggggctgatcccgcgtctcccctcagcagacaatacaagcgcctcggaccgagtccccgaacctgccctagccaaaatggcggccgagaaagagcggaagtgacgtaagtgcctcattagcataagaggactcattgtccagctaaataggggggggcagtggggacagcacccctaacccccttttccccagggggggttcctcttactcccacccctgcttgcacctaacttttcctgagggagggtgctctcagcacccccacccccgcttgagggaaattatataatccccactgaggggggagctctcgcgagaaccaggcggatttgccattgacccactaggaggcgccgcggataatggccgcagtgcgctcccggggcccgtgtgctcggcgggcgccttcctctggccgcagcgccggcggcggaggcagaagcagcgggccgcagcacgcccagcactcagtcaggtggccgtgctggggatccctgcgcgggcccagctgggcctggactacatctggcgggaggggtgtgcggggcggcctggggcggctccacgtgctcagatgcccgcgcttccacggctgagaagcggcgggaaggcgccgggacacctggccggtcgcccctgacgcctcctgccttaaatgaggtgtgagggcctcgtgcttcacacagcgacttgagatgagacacaaccccatggatgccttagcccttcctggtggggtattcggtgcagaggggccgagattttattaaggtccgccgttaccctgtgacttgacattcttcccagtcacagtgatggactcttctctgacctgaataaaaaaaaaaatgggaatcctagtgccttgaggccacccaactggtgaaacttaaggatgagaagtgatgttgccaataggggcattggctctctgcaagatccttaaacaacacactttgtagtcctagggacatagcttttggtgctcccacaatctgggtagcataagacagcacatggttgctttgtaaatttaggtcaatcccaaccaatacattatctcctcaacatttttgaaccaaccttttaaagtaggttgttcaaagtaacattatgatttaaagtatcattggttggttaaatgtattgacaagtaatagatgtcaatagtgaggaattaaccaagcctgtttccttaatatgtgatctttaggtaaatacacctgtcttttgctgtttctttacatttcaagttaacatagtttcaagccatacttaacatccgaaaataatctgagttcgctgcaagtagtataaattgtggttacacatagctgttcaacatctaagacttcagttagccctgtttaacaaacttttatacaacacatttctgcaattgtgataaaatgtatctttaaaagccaagtcagtatttcaagggaaaacagctgaaaaaagtcgtggaaaaaggggttggggcaaagcatttgattcagaaaactaaagaatctaattacacactgcagaagacagataaaaactaatatgaaataagcaaagtaagtttaagtttagtttttcttagatatacttagattccatatagtgataatacaaatacaagggaaaacatctggatttcatctttggcctcatttacaaagcaaaatgggatgctggattcagatgtaaatatttaattttacagtgtttaagcaccagatttactacaaaaatgcatctaaatattccagattcttttctaaatgacttccaaatgctatgagtcttcactgctcaaatactctatggtaaattccaagagtgacagtgttgtgataatgattgtgtgaataactaaaaagatttaaaaggcaaacattatctactctagtgagtatctgagaaggcagtactatctatattaggttctctaaggttgttacttaatttctgctccacatacttgacactgagaactcaactttgagtttaggttaagaaaaaataaattctaaccactccaaaaaaactgagaatattacatttctattatcttagcttaaaactaatttcacatcaagcactgatgaattttcttcttgttatgaatgagagaagtttcttccctaaggaaagcagttccctcactggccagctggacagttctggacataagggaaacagaacaagagtggcccttattggaatgtgtactatgggttcaactatagaagcgtgggagggggtggttttaatgttcgaaatgacaccacaggttttatagtctgggattcatttctggtagaatctgtcagagagaaatgcaaatgaaaaatcagattttcatttttttttcttttaaaaaagacagggtctcactctgttgtccaggcatgatcacagctcactgcagccttgacctcccagactcaagtgaacctcccacctcagcctcccaagtagctgggaccacaggtgagtgccaccacacccagctttttttatatttttgtagagacaggatctccctatgttccctaggctggtctcaaatgcctgtgctcaagccatcctcttgccttggcctcccaaagtgctgggattatagacatgggccattgtgctgggcctcaatttcttcagcagccaagttaagccaggaaaatgtagtaattaggaatactgttcaataaataatttagagacacctcttacttttatttccagaagaaagtcaacttaaacttacttgctcaaagcatgcccttactcaaattttaaaagatactacatgaccataacctatgctacagttagaaattaactgatctcttctgaaatacctactttagagaaagtgggtaaacataatatttgccctggctttattggatagcttagcccaaattttaactggcagaacacttttctaaatggagagaagagcttaaggcagagatttttcaaattagtagggatgtgagctttgctgagggtctttaaataatatgaaaacaagtcttttgagaaaaaaattgttatataattcagtaagatgtttaaaaattactgtagcagctaagtttctgcctcagtgtcattaatatttttccttactgatagaggttattgctcaaaagagaaaaaaacggctatgtaatcaactgctgtcaaattgtttcccaattcacaatatgcattttaaatagacctgctttgatagatgaaatgtttcatcaattcaacagctgaaaagaaccgaactgtaaatgcctgctctaaatgtattttctagtttaagaaatttgagatacatttttaaggaaagggcagaggtgtgtatttctttttcaattcatacagacacagccataaacatttcatcagttaacattatcttacttctgagatcaattaggtataaagatctatgattccagtttttaaaaagactatttcaaattattccccatgtaaaaaattctacattcacatactctaatgaaggcagcaatactttatgcaaaaaaaaatatacatttatttataggtctcaatacagcaaaatgaaaacgaaaattgagaacattgctcattaggccagcaactttaaaattatttaatttgaaatataaaataggtggtcttcataaaaagatgcatgaaatttaccttaccttatattttatactttaagagtacattttatacaaatcagtaaccaggcttctttcatgtttaacctgaaatgaacgtaactataaatgagtatctttcttttatgtagtagcaaaaagagtcaataatcctttcaagaaagatactatttcatttcctcccaacttggattcaccataaacacgatccacaaatgatattggaacctagtttaaaaaaaaaaaagtaacgttagtctttaaaaacaattaggcagcttagccggtataccacattaccaacacaacagaaataggattagtcctacaacagaggtccttaaagtaagtataaaattaggggattatgaaagcaactgtgtgtatctccaagtctttaaaattaaacatgcattatctaaagataggtcacatgaaacaaatctgcaactgtttaaaaagcactgattctaggtattaccttggtttactcaagtttcagtttgcatttcaaggaaaaattatactccaaaagtaaaatggccttgtgcgtagatttttcacttgtcaaatttagctacaatggtttagcattaagtaaaatagcttgtaacttccacaagagaagtgacattccatagctattttcttgctctgaataagagttttactattaaatgaggagagtcttccctaccctaagagctcactaacgagccctaaatattacagatcaccacctccttgctctgtaattcctggtcttctcttactaacaggaaatggacatatggaactcatcattcattttaaagtatggtggccattggcggtgacaaaaggaaaagaagcaaagagactcagtccataatgctgattagttagaagaaagggctaggattgagaaagtaccaggaacttttaattatttaaaagagaatgctgactgttaatgttttaaatcttactgttcaaatgtactaatatgaatttttaccctttgtgcatgaatattctaaacaactagaagacctccacaatttagcagttatgaaagttaaactttttattataaaaattctaaaccttactgctcctttaccaggaacatgacacactatttagcatcagttgcatacctcgccaatagtataattcaactgtcttgcccgaacaatcatctccatctggaagacgtagcctttagaaacacatttttctattaatttctctagaacttcttttcggtataatctgtaagaaattaaaaatatatatcaacttctggataaatacacatgcctatgtatcctgacctttcaaagagttcactggtatgtataaagcctaaaactttcactggccattggtaaacagaaaagctcgcacacttgatgattatgatacatttgtcctaagcaagaaaggccattaaatatttgctaaataacttagaataattgtgaaaatgaattctcagttatctttttatagaattattttcccaccatactatcagaaattagtgaaatacggtaaaatgaatcatttgatgcagaaccatccattatttaagatttccctaaaatttaaagttgaaagaaactgttccaaatattgaacaacagggtggacagatgatcatgaagcaactatatatgttagatgacaagaaagaacctcataattcacagtcattttccaataaatgtttatgatgagttttgatttctcatgatttcctttataaattccccaggataaactaagttgctctaggatgagcttgggaagctaggttaaaacaggaacgaggcatcacaggatagaaacaatcctggtgggattcacctatcaccagttgaggtcacagttagacacttaacagtgggtgaatgtgcagcctaactttagatggactgcaggccaaacaccagatttacaaagacagcggagttgggcagtccagtgggtagacccaagcactttcttcagtaactaaatagcagggagctccgtattttcagagtcacacttttttttttttttttttaaagatcagtgtctcagttcatagggaggcagcaatttctacctttttttgtggggagaggggagaaagcaagaagaggcagtttggtgtaactttgttctcttcaaagttaaggccatctggacctactgtgcctcagggtttcaccctgaatccacattttttttccctcagacttctaaggcgaccttatcttttgactatgaagtgggtataggacagcacagcccttagaaaaacctgacagcttagtgtgtgcaatcctttatccacatagtttccttaaggattcaaaggaatcaatttggaataaatatggagagaggagaatctgatggtagcaatatttattcaataataaatatttattgaccaatgtactgggtttcaggttttttttttatgttttggggttaagaagtgaacttaaaaactcaatgaagatatataatatgtcagatgctgttaggggagggagcactgggattgtggggtgggaagaactatgatactgatgggactatgtttccacattacctttatttatatatttgtatttttggagacaaggtctcactctgttgcccagagtacagtggcacaaccatggctcactgcagtctcaactttccaggctcaaaagatcctcctaccttagcctcccaagtagctgagactacaggcatgtgccaccatgccaggctaagcaagaaaggccattaaataattgctaaataacttagaataacttttaaagttattattattattattatttttatttttttagtttttgtagagacggagactcactatgttgccagagctggggtcttaaactcctgggctcaagatatcctccatcactggcctcccaaaagtgctgggattataggtgtgagccaccacatccagccagcattacctttaaaattgggattaggctatgaaatatttcctctctttaagagttgctttattccccttaagaatcattttctaagatatttcttttcactgccacctccttcctccccatccacatggtaactttaacactgtggctagtaaaataaaatgttacatgaagccatataatcccataaatgcgattaggatccaggtggtctatgctattaaatggctttatattgactgtagcctttccaggattccttttcttattttgtaaaaagcaccttcttcctaaatctagggatttaatgacaaaaatgggctttgtctagcgacaaatgaactttaatgcatgtatttaagaaaccaccactcttatgagaagacaatgagatttaactattaaaaaaaatttttttttttttttgagacagagtctcactctgtcgcccaggctagagtgcagtgcaatctcggctcactgcaagctctgcctcccaggttcacgccattctcctgcctcaccctcccgagtagctgggactacaggcgcccgccaccacgcccggctaattttttgtatttttagtagacggggtatcaccatgttagccaggatggtctcgatctcctgaccttgtgatccacctgcctcggcctccccaagtactgggattacaggcgtgagccaccgcgcccagcctatttaaaaaattttttgggctgggtgcagtggctcatgcctgtaatcccagcacttggggaggcggaggcaggaggatcacctgaggtcgggagttcaagaccagcctgaccaacgtggagaaaccccatctctactaaaaatacaaaattagccaggcatggtggcgcacgcctgtaatcccagctactcgggaggctgaggcaggagaatctcttgaacctgggaggcggaggttgtggtgagccaagatcgcgccattgcacactccagcctgggcaacaagagcgaaaccctgtctcagaaaaaagaaaaaaaaattgtgcaattaacaggttcacttttgtctgtttggctgctctgtcatttatacagaacacagctaatcattgctgtcaatacatgaaaatccagaactcccaggccatccttcaacccccatcccctccactaatccttgtatggttctgatgcagcaaaccaccctcaccccattcctctccctgctgtgtttttcttcacagcctctatcttcacaactagttaccagttaccctaggtttttattcaaaaccatcaaaactgtggcctgtgaaatccacactggcccttcccgctgtacagagattttgtgagtgccactattctttgcattgttgccacatggcaatcagagatcttttttgtttttttttgtttttttttagacggagtcccactctactgcccaggctggagtgcagtggcgcgatctcagctcactgcaacctccacctcccaagtagcttagactacaggcccaccaccacacttggctaattttttgtattttttagtagagacagggtttcactgttagccaggatggtctcgatctcctgaccttgtgattcacctgcctaggcctcccaaagtgctgggattacaggtgtgagccacaatgcctggcttttttttgacagtcttcctctgtcgccaggctggagtgcagtggcgcaatctcggctcactgcaacctctgcctctgggtctcaagtgattctcctgcctcagcctcctgagtagctgggattacaagcgtacgccaccatacctggctaatttttgtatttttagtagacaggatttcgccacgttgcccaggctggtcttaaaactcctgacttcaagtgatccacatgcctcggcctcccaaagtgctgggattataggcgcaagccactgcccatccaccagccaacgcccatccgcaatcagagatcttaatcatatcacaaatgactctttagccttagggtatagcctcccctctctttcatccccaagttcagctctccagtctatttgcattttagttctagagaggcttcatttttctttttgactgtcaacagccaggtcctaatttgtgtgtgtgtgtgtgtgtgtgtgtgtgtgtgtgtgtgtcaattctcacatttaaggacctagattttcctgcattaagcaaaggacccaagaatcaacattatttagtggaaaaaagtatcaactagtagaaattattaagtaatgtttggggggcttgggggtcactaaagtagatgcaggggcattttatagtttcagagattaaaaaaaaaaatctggcaagttttgtcatttgccatggtcagtcacacaaagcagctcacatctactacagcaaatctagaccaccaccccatacacccagaaacagacacgcaaaactcagagggaccgaagctttgtccaaattgaacaacaaaaatttcctcaaacatatggagaacaaggtaactgagagagctctatataaatattaaagagtttaaccttttctgtagacaatgctgtaggtattcatatgaaatgcagaaaattaagtacatgctattctttggaacagattatcagtaatagcaacattccaaagagcagttgagccttaatactaatgttaacaagcacacaaacctaactgccttcagctttttaaaggaaaagcacaatatgtctccttgagatgtttaggcttcattagcaacttctaggaattttagtctgcctttttagtatcccagaataaaaacaaggtagaaatgtaaagtgtctctttaaaatatccattgtaaagaaagttagccaagaagttatataaaagtagtggaaattttcactgtacctgaaacttcctgttaaatcagatgctcctggtctcagcaagatctgagttaaaaaattggccccacggctgccaaataaaacaatcagatcttctttacaaaatacaatttataaacaagagaaacacatcgaagaacagtgttaaaatgctatactaatttcataaatgtaacattaatttcataaaaatgttatttatctagaacaaaatagaaatttttagtcaatgaaaggagacctggctaggcgcggtggctcacacctgtaatcccaggaggccaagatggctggatcacttgagcccaggagtgaccagcctgggcaacatggcaaaactccatcactacaaaaaaaaaagtgaatatatatatatatatatatatatatatatatatataaataaaatacattcatataatatatatacacattcatataatatgtatattcatattatatattcatatatattcgtattatatatattcatatacatatatattcatattatatatattcatatatatattcatattatatatatatattcatattatatatattagctgggcatggtggtacgtgcctgcagtcccagctactgggaagctgaggcaggcagatcacctgagctcaggagttcgagggcaacctgggccacatggtgaaaccccatctctatgaaacaaaaattagccaggcatggtggtgcaggtccacagtcccagctactcgggaggctgagacaggagaattgcttgagcccgggaggcagaggttgcagtgagttaagactttaacccaggtctgtctgaaatcaatcttaattaaaattacactataattatggggagaaaccctacatatttagaccaaaagtatagaacaggtcacataaattaaaactgaaggtccagtacagtaacttttgctgaatgagaccatttctaccaaaggtccaaaggtttatgctgatttttccttaataaaaaacatccaggctctaatcacaggaaaaactgtaagaaactatctgggagtatttactggaagttataacctgatcccacaaatcccgggcagcatgatagctaatccaaatacttgctatgaatacatttccagtagttatactaataaagaagttgtaacacatgtacctacctgattatttttcttttcaaatcccagccatatacacctccatttcctttgtagcgagttccagagacaatatcaaaattaccctccttttgcttcctgtagaataaattagctgtcaattagaaaaagccactgagctttcaacagtcattttcatgagctacacaaacaaaacttttaagagaagtcgacacaggctgggtgcagtggctcacgcctgcaatcctagcactttgggaggccgaggcgggtggatcacgaggccaggagttcaagaccagcctggccaagatggtggaaccccatctctactaaaaatataaaaattagcctggcgcggtggcgggtgcctgtaatcccagctactcaggaggctgaggcagagaatcacttgaacccaggaggcaggttgcagtgagctgagatcacgccactgcactctagcctgggcaacaagagtgagactccatctcaaaaaaaaaaaaaaaattagtcgggcacagtggcacatgcctttagtctcagctatttgggaggctgcaatgggaggatggcttgagccagggaggttcaggctgcagtgatctgtgattgtgccactgtactccagcctgggtgacaatggaagaccttgtctctcaaattaaaataattaattttcccaatacccttccattctgttcttgccttctttgaagcaaataatactaaaaacagcctgatgtcctgccacacttttctttgcctagagaaagataaagacaaacatacacccctaggatttttggttgcatttacaaaattgggatgcaaaaaaagtacattttgtgacctggtttctgtcagttaacaatacatatcatggggtcagatgtggtggcacacgcctgtaatcccagcactttgggaggcctaggcaggtggatcacttgaggtcaggagtttgtgactagcctggccaacacagtgaaactgtctctactaaaaatacaaaaattagccaggtgtagtggcacgtgcctgtattcccagctcctctggaggctgaggcaggagaactgcttgaacccgggacgtggaggttgcagtgactgagactgcgccactgcactccagcctgcatgacagagtgagattccatctcaaaacaaaaacaatgcaaatcatggaatcatagacatccctacaggtcaagagagctctttcccattctttttaataattgcaaaactacttcatagaatattcaactcacacacctctgtggttgtttccatggtgccctaccctctcaaccacaataaacagtgctacaataaactttttttgttttgttttgtttttttttgagatggagtctcgctctgttgccagggtggagtgcaatggcgccatctcggctcactgcaacctccacctcccgggttcaagtgattctcctgcctcagcctcccaagtagctaggactacaggcgagtgccatcatgcccggctaattttttgtatttctagtagggacggggtttcaccatgttggccaggatgctctcaatctcttgacctcatgatccgcccgcctcagcctcccaaagtgtgggattacaggcatgagccactgtgcctggccacaataaacgtttttataaatgtattactgcttagactccccaaaatggaatatactggaattgcccaaatgaagcctgagtatttttttttttttttttgagatggagtctcgctctgtcgcccaggctggagtgcagtggcgcgatcttggctcactgcaagctccgcctcccaggttcatgccattctcctgcctcagcctcccgagtagctgggactacaggtgcacaccaccatgcctggctaatttttttgtatttttagtagagacagggtttcaccgtgttcaccaggatggtctcgatctcctgacctcgtgatccgcccgcctcggccccccaaagtgctgggattacaggcgtgagccactgcgcccggccaagcctgagtatttttaattctaacacatattttcccaaatttgaacacatattttccaaaagggttatagcaacttatacttccttcagcaatatttgtgtgtccattttttaccatcttattggtactggatattactactgctctaaaagtttttaactttgttaaactaatggataataaaatggtcacacacagttattttgtgtttatttccttgactacatcccaggaagaacgtcttcttttattagccatttggatttcttctatagatggtctgtttgtatctttttgcccattttctactctacaggttaaagaggcttttgtatactggagatataaccaaaaaaggtctaaggtgactttacgcagagattgaaggatgagcagcagatggtcatcaaggagcatggaaacagcatttcaggcaaaggaaaatggaactctgtgaactcagaagcatgctatggcatggaaagcaaaaaggaaggagcacaaggcagaggtcagaaagggaggcaggggccaacaaacacataggggcttgagggacaagggaaggaacttggatttttccctagatgttagtgggaactccctgaactccctgaactggagggacaataatctgattctgtttttatgtatctagcttaaactcagaacagcttccaaaatcttattcacagaggttttgtggtcttttgggctaagaatttaattatattgcctacaaacaaatataactgtgtatattttactaacatttaactaaattcttatcttactgtattaacatttccatgtttaatgatagctagcatgcctgtattaatgcatgtattggaaatgattcagcatttcactatttggtgtggtatttgtattaggactgggttatttttattatgcttaagaggtttccttctattcttaaagttttaactagaaaatggtagtaaataatatctcctttagcatctacagacttaaccacactactttgttaacataatgaatgaattataagtgattaccaataatgagccattctggcattcctggaataaacccttttgttcacggtgttttattctaataactcaaggcttaattccatttatcagagaagccatcttccacctttttctgtggtctgaaagaattcagataacgaactacctgttgatttgctcctcaggactcctaaaatacatcatttagtctcaaatgtgtgttgtgtgtgtgtgtgtgtgtgtgtgtgtgtgtgtgtgtgtctactatctatacagataaatattttagagacaaggtctcactctgtctcagggtcaccaagactagaatggagaggcatgatcatagctcactgcagccttgaagtcctgggctcatgtcatcctcccacctgagccgcctgagtagctgggactacaggcgcatgccattgtgtctggctaatttttgttattttttttgtagagacaagtacttgttttgttgcccaggctggtctcaaactgctgacttcaagcaaccctcctaccctgacttcccaaactttgtttatatttttgatagaaaaaatagtatgtgtatttttgattaataaaaaatgaaaataagcccaaaaccagtaagataaatgtttccagtcatatttctttcaaatattagaaatagtacctacctaataaattcaggaataaattttggctgaaatttgaaaagaataaacagtaagtcagtaaaacaggctaagactaccataaatagctaataaagaaacataccacttacatggtgtgagagatcagcatccataataatgatgtagtttcctgtggcatgtttcattccatgaatatatgcagttcctaaaaatgaaagtagatccattcaagaaaatcaacagaaatctttacatatacatttgaacatcaaggaaattgtttagcacctgaagagcacacattagttctctaaaagtcagattaataaattggtatttttcaccttaagtacataagttcatgtatattacatatataatcaagaaggtagctggccacacacccccattcagatgtcaatttaatacaatagatcatacctctatttcagtatagcaaagaaatagtttataagttcaaaagtctaagattatgtagcacaattatcacattctcatgctttaaaaacccatctggtgtttccttggcatccccctaagacactgatgagctccacatttacaaatcagcttcctacttaatatctccacttgggtatttcagaaatctcaaagataacattgcaaaatcatcttccaattctctacctctctcttacaggccacctctccaggaaaggcaccaactatccaactgctccatccacaggtctagagatgattcttgatttcctgcctttaaccataacttctaaactgtaattaagtcctattgattctccatccaaaacatttcaattccctttttcttgtcttttacaccgtaaacctggtacgctagacccttgctctggtatttggggccaaaggcctaggtgacaattactcagccagctccatgcctcaaagtcccacagggacttggcaggctagggtaacttgttaggagcaggacttggggattcctgcattctctagtccagacccctcacaagtgtcttatgagcaaggctgaactcttctaacttattttgttaagaagtgaatatcggctgggtgtggtggctcatgcctgtaatcccagcactttgggaggctgagatgggtggatcactggaggtcagggagtttgagactagcctaaccaacatggcaaaacctcatctctactaaaaatacaaaaaattggccaggcgcagtggctcacgcttgtaatcccagcactttgggaggccgaggcaggcggatcatctgaggtcgggaattcgagaccagcctgaccaacatggagaaaccccgtctctaccaaaaatacaaaattagctgggcatggtggtgcatgcctacaatcccagctacctgggaggctgaggcaggagaatcgcttgaacccgggaggcagagatcgcggtgagccgagatcgcgtcatcgcaccccagcctgggcaagaagagcgaaactccgtctcaaacaaacaaaaattagccgggcatggtggtacacgcctgtaatcccagctactcgggaggctgaggcacaagaatggctcaaacccagcaggcaggggttgcagtgagccgagattgtgccactgcactccagcctggggatcagagtaagactgtctcagaaagataaaggagtgaatatttacactttttggtttcatggcagtttccagatttttttgaatcccaaagaatcttctgggttcagatactgagaacatttgatgcttgggaattgatggtcttcaagatagcagactccagttaagcattgtgctttcttcatgttaagttttagcacaaataaaggcagagtttcctctcagaattactgagctcatatgagcttttcaataatgctgtatgtttaaaagctggaaaagcttccttttttaaaaataaagaataactgtttttatcactaggctggagtgcagtggtgtgatctcggctcattgcaacctctgcctcctgagttcaagcgactctcctgcctcagcctcccgagtagctgggattatagatgcgcgtcacgacgcccagctaatttttgtatttttagtagggatggggttttaccatgttggccaggatggtctcgatctcttgacctcgtgctctgcccacctcggcctcccaaagtgctaagattacatttgtgagccactgtgcccagccttaaatgaagagtaactttttaaacttgtaacttaaaggatgttccaaggtttgcagcatgctggtccaagatatttgccctcagacccattctctggcccttccctactctgtgctatattgggtgaactacatattccagattctcttgtcaactggctgccaaacagctttgggaggtacaggtggaagactgcagggaggggaaaagggaaaagtctaagtggtcctccctctgttactctccctcctacctctgactgggaatttcccacagttctagctcctgccaggcagcccctgccccatcattctagctccctctgggcagcccaggttcttgggctctaacatctcttcctgccgttgctccatccctaggggtggcagtgacctccagctgttactaatcttagtagcctcactgctccatttggtttctcaggaactccttcaggggtgtaaccagagactcagtattaaattccctacactgaaagacttacagtggttctgttttcctgagtgggtcttgacttatacaggcgacccaagttataccatttaaatgtcattaagatcattaaaaaccatcataggaagttactgtattttggccctattccaaactgggaaaatacacactggatcatgtcaccaagcaagcagcaggtgtgaggggttagagattacacgacttacctagtcccaactttttctctcgtggtcttagaagctgtaggaataagaaatagcattttacacacagaaacagaaatcttatcatgttaaattttatcttattcaaaagtgcatactcactttaatagaaatatagttgcacttgttagaacttaaagcaaagtatccttaatatttttttgccaaaagaaaaaaaaaagcatttggtaacaaaccaaatagtttaacgtagctaacattttttttttttgagatgcagtctcgctctgttgcctaggctggagtacagtggcgtgatctccgctcactgcaacctctgcctcctgggttaaagtgattctcctgcctcagcctccagagtagctgggattacaggcatgcaccaccatgcccggctaattttcgtatttttagtagagacagggttccaccgtgttagccaggatggtctcgatctcctgacctcgtgatccgcccgcctcggcctcccaaagcactgggattacaggcatgagtcaccgcgcccgtccagcaaagcaacattctttaaccctgaccctacaatcacaattttaaacttttttttctggtgtcactcactctattttaaatatgtctttacatctatatttgattttccttttaaatctattgattccttcctagaaaaatgtaggacttacttcattattttgcaccttcttgggaaatctgatgtttgttctctcgattccctttgggttttgaatactaatatcactcttcctctattaacttatcttgaccttatgcttggatgacctcatctcctctactggtccaaggacatgtcatattcctaattaaattctttctcttttcttactattggtcaatcacttagtcctcctaaatctttttgcttaatagttggagcctgacttttacttgtttagtttttccttttggctggacactttaaaagtcaaatgccaaagttctcactgtgccctacgtttctgaggtatggggttcagggagactcattagtgagcatgtcttgtctatcttgtccccttctacacttgccagtatataagcaggttgcctctgactgcaaatctctcaacaaagcattttcaattaaagcagatgattttttttttttttcactatatgcaatctgctggaggtttctatttgcatggaatgtctttttccatcccttcactttgagtctatgtgtatccttacaagtcaagtcttttgtgggaagcatatagttggctcttttttaaaaaatccattcagtcactccaggtctttggagaatttaatccctttatatccaaggtaattaccgacatgtaatgtaagaacttcctactgccattttgttaattgcttctagttgttttgtagatcttttgcttctttctctttctcctttcctttatgattatcttctgtactattatgctttgattccttactttttatcttttgtgaatctactttaggcttttcctttatgattaccatgagacttacaaaacccatcttatagtgataacaggctattttaagctgataacaatctaactctaactgctaaaaagaaatcctctacacttttactccactatccccacatttaaaaaattttaagtcacaatttgtatctatagcaaagtacatcttgcataaagatggataaaatacactgctgtctggtaagagcttacaggaaggaaagacattcaaataagcatctatgataattgcaagtcactgaacaaaatcgagcaggatatatcagatcacagctagattttatttgattttgtgaataatttctgacaaaatactgatccccatctggtatctgccctgaaaaagcaaattttttaaagctcatctgagattttctacaactctgttttagctggaaaatctttcttttaaaaaaagataactttggccagatgcagtggctcacacctgtaatcccagcactttgggaggctgaggcgggtgaatcatttgaggtcaggagttaagagaccagcttggccaacgtggtgagacctcatctctactaaaaatacaaaaattagccaggtgtagtggcacgtgcctgtaatcccagctactcaggaggctgaggtagaagaatcgcttgaacccgggaagtagaggttgcatgagctgagatcacaccacagcactccagcctcagtgacacagtgagactccgtctcaaaaaacaaacaaacaaacaaacaaacaaacataactttgttacagttgcacacccccttaaccccaagtgatactttctaagacccccaggagatgcctgaaatctccaatagtaccaaaccttatatatactttttcttatacatacacacctatcacagtttaatttataaattaagcacagtaagagattaacaatacccaataataaaataaaacaattacaacaatatattgtaataaaagttatgtgaacttggtctaactcaaaaaatcttcttgtactgtacttacctcttttcagactgcaggtaacaaatcacggaaagcaaaaccatggacaaggagactatgatacttataattttcagaatcttcaaaggtttatataaaatattagagtattatggagccattaacagaaatgaggtgagctggtgacaaaagatcgccaagacagaattagaagtaatgatgatacaggaagatggcagttatgttttaaaaaacaagaccaccacactacctagttctgcaaatgcacatacacacatatatgcacaaaaaaacgcaccaaactgttgacctgggtctcccctgtgcaagggaatgggatgcctatagaaaatgttcatcaggtcgggcgtggtggctcacgcctgtaatcccagcactttgcggggctgaggtgggcagatcacctgaggttaggagttcaagaagagcctgaccaacacggtgaagcccagtctctactaaaaatactaaaattagccagcatggtggtgcaggtctgtaatcccagctactcgggaggctggggcaggagaactgcttgaacccaggaggcagagtgtgcagtgagctgagatcttgccattgcactccagcctgggcgacagagcgagactccaatctcaaaaaaaaaataaataaataaataaataaaatgttcatcaaaggcaacttcggttttactggtaacatttatattttacaaggatgtgcttgtttatttcttatgtaggaaatccaaactatttctatttggtatgctttactttcagactcttaattccacctctccaccctcccctgatccttttttgcctcttcatatcaatctgatggcccctttctatgtgaggcaggatagcattacagacaggaagatgaaccctggaaccacaatgcctgggtttgaatcctggccactactcatttgccatgtgatcttgagaatataaagaggcgtgacaaagccccctctcacttggctttcatgaggaacaagcaagtggattcacataaagtgcttgcaagaatgacaggcatatactttttgaagcatgtttgccacagctgcttataaaatacttttatgggaaactataatttgtttgacaagaacctttgtaaaacttatcacagacaatcttgaaaaaagttacttaaaaacagaattgagactatagtacatatacagttttataaactgctttatacttattacaaaggcattaaggatttttgagggtcatgagattactgccagatgatacttcagaaaaacagtatcaatttatactaggatcaacagtatttgagtggacttgttctataatactctcagaaacactgggttaaaaagaaaggagaaaataaaaataaatcttcagctaataaggctaatatgtactctcctcctgttttgtaaatcttcacttatcagtgaggctcagtatttttttcttgtttactggccatttctagttttggtcttatgaattatctggttggttggggtactgatcttgttagaaatattttggtatttaggaatggacagaagtttaatattttcaagtagtcaaacctttttatcttacatttgatgttttaagaataataaacgtgttacattttattatcagagtaagtttttaaaatactaaactataaaataatgacaaaatgtaagacaaagttctaagaatctaccacacagcacggtgactatagttaatagtatcatattatatagttgaaatttacagagagcagatcttaactgtcctcatcactgtcaacttgcccccaagggtaactacgtgaggtgatggacaggttcattccccaaatgtggtattcatactttaaatatatataactttgtcaattatacctcaataaagctggaagaaaatatgacaaaatataaatgactttatctgatctcaagttgggagatgaaacaaactacataaaccaaacataataaaagcattcaacacagagcagttgaagtccttcacaatttcagatctctgccttgtaagcactgtgaatagttcagagtaagtgcccccaatttctctatggtcctacctagttaggtcattaaaaatgacctaacctctcgcttcagttgtgtcacctacagaatttttaaaaatatcttctttggcttcttttctgaaagattcatttcagccagtctgaaaggctgacaaagcatctgtggtgaacactttatctgaggtattctaacatggtttcaatatccttcattttctcaacgaaacatacatctgtcactaaaagcaagtgtcatccctagcatggattaatactgtttttttttaaaagtcattttctagtttaacttatttaaatgtcataaaataatgaatgaataaggaattttatctggtagtagagggaaatcgtaacagtgaatgcaactttttttctcattttgaattttattgggttgatagaaaaaatgtctttgaagacaatgttgttccaaaatttgaaaggtcagtttagtaaccattccctaaaatcaatcaatcacatcctaaggctgaggttttatgacaaaagtattcaaaatgttgtctggttgatggtccgagattaaatggcagcacataactcaaaagtgttgtgaatcagtggccttcaccctgggcttctaaagaaaacagggaactactggccaaaaattcaaacctagcattactgaaagtctctgctagaagcctgaaaatttgtcaactttttacctctttctgtattcccatccattagaaggttttcagagaagacttgaggtgtgacagacctgagttactcatctgtgagacagactgaaagaattcctagaactacatttaccatgtagtaacacagttcctttaaactcttgccaccaagacctcatacaactgacactcacctctaagtagaaagtatttctattactgagatttatcaagaatatttagactgagtggcttttttttaaaatgattaatttaccatttcttgaactgtaaataacaataaaggttctcaaagggacttctttctctataccaatggttctctactggaggcaaagggtaatttttcccctaaggaaatatctcacaatatccaaacatttgcagttgccaagtggggaggggggtttctagtggcatctagtgagaagagtccagatgcggtgctgaacatcctacaataaacacgacaacccccacagtaaagaattaatctgtccacacgtcaatagtgccaagactgaaaaactgtggtctgcaataatttgtgaatataaattataaaagagctcgagtatacataaacatttgtaaatacaaaccggtaaccaaaaataaaattcatgaagccattataaaataaactctatatttgcctaagtaacttctatattagaataacaagtttcaaggtacagtgggtgaatctaaagtttaggactaatacagtcaatctactttcacaagactattctatagactaaaaatgccaagtactctaagaagtcattaatgtttcacaagaaaacagtaactttttctacctacacgctcttaatttcaggcagtattctctaatgaaagcatgagaatacttaccgaaagggagcaagaaagattaagacacacacacactaccaattataacccaattatataatattccttgtcaattcagtatcatgctttaatttttgcccttcaagaaaatttatctgcagaattagttataaacagagttcatccaaaagctcactctttgctgtaaaatgaccactgacccaacataccaaagatatgtaaaattttacggacaacaaaaatgcatttaaatcccaaatgcgtaagttgctctttatcttttcagtttctaaacaaatagattgaatttaagcattgttcatgtctcatctttcccctacataatcacaattcatatcacagaaaaatgttcttataacttacaattctgtctgacccatagatcttctccaactgttcagcaacatcccttgttccatctgggcttccatcatctatgattataatttcatagttgattccactaaaaaaattaaatttgtattaatgactgatgacagtgttctcaaatttaaaagtaatttaaaaattactaattccttaaaagtataaatggagatgtattgctatattaatcgttgaggaaaacttcaattatcaaatgaaataaatgtcaaacatttagtactttacctccaaacccagtatgttgctgaaacatgctaatgtcctgagatattaaagaattcctacacagagaacaaactttttagttcaaaagaaaatcacgtaatgacctatgtatcatatgaattttttttgttttgagatggagtcttgctctgttgccaggctggaatgcagtggcgcagtctcggcttacctctgcctcctggcctcaagcaattctcctgcctcagcctccggagtagctgggactacaggcgcccaccaccacgcccggctaattttttgtatttttagtagagacggggtttcaccgtgttagccagcctggtctcaatctcctgacctcgtgatctgcccgcctcagcctcccaaaatgctgggattacaggcatgagcctccgtgcccagccatatgaaattttattacctatttggaaataatattctgaaccttaatagcaaatcttagttacataaaatatttcaaaagtactttacatggtaactcaaaccaaactgagtaactcagtgattattcttgttaatctgatccaaatagaataatcaagtataaatctgatttaatttcatctttaaaaaaaccgattttagaatggtgacattatcttaaaccacaatttcaaatagttgtgcctattacctcacattatcaaattaaaaaaacaaaagcagagtagcattacaaaagattccactgtgcttcagaattaacatctgttacttcccattaatctcaggtggtagtttctagtctaaaaacaaaccaacacaatacttggtggataaataatacctacgacataacattccgttttctcttggtcctgctttaagaaacaaatacaagaggctgggcgcggtggctcacacctgtaatcccagcactttgggaggccgaggcaggcggatcacgaggtcaggatatcgagaccatcctggctaacacagtgaaaccccgtctctactaaaaagaacccgggaggcggggcctgcagtgagccaagatggcgccaccgcactccagcctgggcaacagagcaagactccgtctccaaaagaaaaaaaaaaaaaagaaaaagaaaaaagaaacaaatacaagaaaatcaaccagaaaacatattccactgttaaaggctttaacaagtcagccccagcaaactttgaagacaagaaagcaaacccctgtgttatctattctccaagagtagaacaatgactttggcttcccactgtgccttaaatctgggcactggtgcctttacatgccaaaatatgtaaggtgattttaatagacgtgctgaaagagaaattccataaacaaaatggggtcgttaaaagcaaattactgtcccctaccacttcaaagcagctacaccacctgagggtgaggcagctcaaaggtaccaagctgggctgacttcaagtaatttgattgcatctgaaaagttttgtttcctttatcaaacttcattttgatcttaaaagattgattcacaaaccattaaaaggaaacataaattgtactacataaaaaaattaaaacagcaaaaaaaaaaattgcaaaattagaatacaagccctgaacgagatcggttgtatgatagttactttctttaatttagagcttatagaaatcaaaattaaaagattaaacaggaaaaataaaaattttaaaactctgaggggcaaggcatatgaaggcagttattcaaggaaatacaatcaaaacagcaatggttttcacaaatgagtacttccaacaatgttaagtctaatgctcaggcgggctggttgatagggaaacaggcactctgaagaatggagagtccaaacttgtacaaccttttttttctttagagcaatttggcagtaactgtccattttaagcacatttctgtcgacccagcaatcctacctcgaagaatttatccctagtacacaagtaaaagtatgaacgcgtctgctgccaacactgatgcaataaaggagcaccgctatgtgtcaagcacttttctaaatttagctggaaaatatggtgtgaacaaagtccttgttctcatcgacaaagcaaaagccaaaaaacagaaacaaccaaaaggcgctggaaataatccagttcattgccatgacctgattaaataaataacacagccatatggaatgttacctaacttccaaagtaatttgctatgtttgtacatgttaatatgagaaaaagtcttcaaagatttcacagcatgatcccatttgtgcaatcgtaaaacaagttacttcgtactgactccaggattttttgcagtttttaaaaacactgcattaacacttccaaattcgaactccacccaccccccatcccggttctaacaatcacaccaaacatccaccagtgatcagcgaagatgctcttctgctttctcctttccagaaaggttatcgtgcccagcaatagctccctaacccacacacaccaaacctcatgcttatgtaagcactcggcaccggagcggagagtgagagctctcgcttggactcccggctcttgccgcagatcctgaccgcctagagggaggagtgggatcacgctttcagcctcgcttccaagtaaaagagtggccaacctttctacggaaaggcgggggacgggagtactacataataaagataaatgagagtctcacaaaacccaagggcaggaatgagaacccaggacacgaagaaaacccaacaagcatccgcctctgcttccctcgcagggtggccctctccccgggccttcctgtgtgaggcaaagaaggctggacagggccgcttcgcgcagccagctgccgacacccgggccggggaagccagctcatctcattcttcggggagggagacctggtgcgctacctctcggagaagcttttcaccagcagccacacgatgagcggcaggttctcgcgctcgttgtaggtaggtaaaagcaccgaatatttgttctgtcgtggactgcgcacttccagctcccgccgagacctgcgaggactacgactgacttccaaggaggccatggcggaactgagccagatgccggaagcggaattacgtaatgtggcgcggaaaaggacgggtcggaccgtaccaaattcggaagcgggggatgacctgtgtgattgatcgctagttcttctagggccattgcgtggttcaattagaaatattctggatttatacatctttgaagtttaatctgaaggtttcttcaggaagtaaatatctattcatcaccttttcccaagctccataaagttttttagtttatcccagtcgctaggagacagaagacggaagcggaaatgcctttcacgacaacttccggaagaggtcgccatggcttcccgggaggaggtactcgccttacaagctgaagttgcccaacgtgaggaggaattgaattcgctgaagcagaagctggcgtcggctcttttggctgagcaggaaccgcagccagaacggctggttccggtgtcgccgctgccgccgaaggccgctctgtcccgagatgagattctgcgctatagccggcagctagtgctgcccgagctgggcgtgcacggacagctgcgcctggggaccgcgtgcgtgctaatcgtgggctgcggtgggctcggctgtccactagcgcagtacttggcagcggccggcgtgggccgccttggccttgtggactatgacgtggtagagatgagcaacctggcccgccaagtgctgcatggcgaggcactggctggccaggccaaggccttttcggccgccgcctcgctgcgccgcctcaattcggcagtggaatgcgtgccgtacactcaggcccttacgccagccactgccctagacctggtccgccgatatgatgtggtggctgactgctcggacaacgtgcccactcgctacctggttaatgacgcatgtgtgctggcgggtcggcccctcgtgtctgccagtgccttgcgcttcgagggccaaatcacagtctaccattatgacggtggcccttgctatcgctgcatattcccccaaccacccccagcggagacagtgaccaactgcgcggacggcggggtgctcggtgtcgttaccggggtcctgggctgcctgcaggccttggaagtgctgaaaatcgctgcgggtctgggcccctcttacagtggcagcttgttgctctttgatgccctgagagggcatttccgctctattcggctgcggagccgcaggctcgactgtgcagcttgcggggaacggcccactgtgactgatctgctggactatgaagccttctgtggctcctcagccactgataaatgccgctccctgcaactactgagcccagaggagcgtgtttctgtcaccgactataagcgactgctggattctggggcattccacctgttgctggacgtcaggcctcaggtggaggtggacatttgtcgtttgcctcatgccctacacatccctctgaaacatttggaacgcagggatgcggagagcctgaaactcttaaaagaagcaatctgggaagagaagcagggcacacaagaaggggctgctgtccccatttatgtgatttgcaaactgggaaatgactcacagaaagccgtgaagatcctccagtccttatcagcagctcaagagttagaccctttaacagttcgggatgttgtggggggcctcatggcctgggctgccaaaatcgatggaacatttccacagtactgaggtgactggtatagtctgatgagaaagatgtggattgccataatacctcaaagatacacttgtttgcatttttcggtaatatacataggagctggggattctacagtatctgtgaatacgtggactcctttttataaggagttttaaaaattgttatgtattggatgaatgacttattaatggattataccgtttctgagaaccatcattttttttttcagcacacggaggatgtcttggacatgtgagatgtaacgtgacaggattttgcattttaaactgcagatcatttacatgtccttattttccacctcccccagtcaaaatgctttctaaatcattttcacagattatatacttcggatctgtttactgttcagttaagaaattcttggatcttattaatatttcagatgatagaatacatcctacagaaatacatgtttaaaatgtaaattgttttaattattcagaaagagggtcattctatttggccttttgaattagtatcaaaatgagattttttttttttttttgagatggaatctctctctgttgcccaggctggagtgtagtggtgcgatctcagctcactgcaacctccgcctcccaggttcaagcgattctcctgcctcagcctcctgagtagctgggattacaggcgcacgccaccacgcctggctaatttttgtatttttagtacagagggggtttcaccatgtttgtcaggctggtctcgaactcctgacctcgtgatccgcctgcctcgacttcccagagtgctgggattacaggcgtgagccaccacaccctcccgagatctttaaagtttaccaaaataaaggaaaccacctttgtagtctgtcagtgtctcttataaattgctactgttttcttaaagttaacttcagggtccaccttatgttgcacacatatcacatcgtttaaattgcatactatggtttgacttgctttggaattttcaagtcaaagtcccaaccctttgcctctccccctttaatttgccttttctcttttgatttaatgtttttttattccagcattttatactaatgtaaaatgtttttatgtttgtttacttaacattttcataaaatagtaggtagtctcaccaacttccaatatatacaacaacattataagtaaaaatttgatttgtgagtgcctatcagtggccagatgaactaatggcttgtcagaagggggcctgtgacctcctgcttgctgcatgcaggcttataatcatcaattgctgctgttgtttttttaagaatggcagaaatcacagatacaactataaaatctttgtatttctgttaaccattttttttaaagcttaaatgtatcataagccagcaaaaaccctttgtagaccagatttacttaccagtttgcaatttgtgatatagaatcttgttttattataagagggtggtatttaacaaattcaaaattagtcatcactttttaactgtgaaacattgtaactaattctttgaacaggtatacttaaagtatggtatacccttctgttataaagatgaagcaggtctcttatgactgttcctgccaacgagttatggaggtaaatgactgtgacctggagtggagaacaaagatggctggcctgtgtttttcatctccttcttccagggacaactgattctgatacatagcaggaaacaaatagcgacacacaggaacaatttcatattctaaagactgaagtcctaaagttatagacagttgtagttcctataaacctggttgtcacaggggacaggcaagagaagctgactagctaagtgttaaaaggtttactaaagtgataggaggtgcttttgagaattttggggacagattcaaggctgtacttctaggaatgatgcccgaaatcatgcacaaaactggccttaggagaacagtgtctatgttgtgctgccctatcaagtaccggaggaaacgccactacagtctcaccagtttcacttgacgtgcccccccaactctcccagaaagcccaacacttcagccacagtccatgtgtcgagaaacagagtcactacattattcttttctgagtcaagccttatgagggtgcctggtaggcagagtctaattacatgcctacatcttagctgcaagagaggctgggaatttgtgttttgatatctacaataggaagacagaactcatgatgtgggattttcccaaatagtgaaatatttttcaaaagatgggctgttaagaatataacagatacccagtacacaacccagatctatttcagtatttgttttttgttgttgttgttttggagacagagtctcgctctatcccccaggctggatggagtgcagcggcacaatctcggctcactgcaacctccacctcccatgttcaagtgattctcatgcctcagcctcctgagtagctgggattacaggcacctgccaccacatctggctaatttttctatttttagtagcgatggggtttcgccatgttggcctggctggtcttgaactcctgacctcaggtgatctgtgcacctcagcctcccaaagtgctaggattacaggcatgagtcactgcacctggcatatattagtatttgaaatttggttttctctggggattgtagctaggtttttatggtgagataggatttgaacataatttgttttttgagacgaagtcttgcttcgtcgcccagggtggagtgtagtgttgtgatcacagctcgctgtggcctcaacctcctgggttcaagtgatcctcccacctcagcctctcaagtagcttgaattacagttgtatgccaccatgcctagccattttttaatttaaaaattttttggtagcaatggggtctgaatatgtggcctaggctgatctcaaactcctgggctcaagcatccctcctgcctcagcctcccaaagtgcttgggattacgggtatgaggcaccatgcccagcctgaacttgatttttttgttgtttccttttcataacaaacatcaaatgccttcagtgtactagttcttctaggttctggaataaaaatgagcaagaggtttcctgttgtagaggagtttatatttaaatggtgataagtaaattactgataagtgccataaaagaaatgaaactgtgacatattagggtgggggaggggatctgttttgaatagcttaattatggaaggcctcagagatgacattaaacccaaaacctgaaaggtgagaaagagccagttacagaagatctgaggaaaattctatactgggagaaaaataactgtaaagacctcaaggtaaataaacttggaatgttccgttcaagaaactgcagaggcaagttgggttgcaaacaattagggagagtgggacagggtgaggtttgagaagcagggaacatcataaactttgtagaccatagtagtttggtttttattctaaatacaataatagctaatattttgagcacttactgtgttatttgggatttgaatccagatgctctggttgaagagcccattccctaagtgtcatgctatactgactctaagcaaaactttgccattgcttcatatgtgttcatgccctgtcagggcatagaaagcaatctatgtcctgacaatcacggaagtgtattccagatacaatagaaatgtactctgagacatttggtatgcctccttctctctagatgtggaactccagagtgaaatcttggggaatcctctgtgtaacactggtgtattacacaggcagtgtcccgaggtgggtggatcacttgaggtcaggagttgagaccagcctggccaacatggagaaaccctgtctctactaaaacaaaatttgccgagtgtggtggtgtgcgcctgtaatcccagctacttgggaggctgaggcaggagaatcacttgaacctgggaggcagaggttgcagtgagctgagatcgtgccattgcactccagcctgggcaacgagtaaaattctgtctcaaacaaacaaaaaccaagcccagaatttgggtgaaaaataggatagtttattatgaagtactgtggattgacactgactctggtttccaatctttagttcaattattcacgatttaaaaaacaacagttgtgaattatctaggtgtttttttctgctgctgctgcctttttttttgtgggggggacagagtctctctctcctaggctggagtgcattggcatgatcttggctcactgcaactcagcttaggactatttaattaatcaacagctgctatgtattttatcctcatgcgcattgctctgtagagaaacatctgcccatgtctgtaggcttgacaaccctgaccttgcacaaaggcccgagtttcccatttatttgcttctattctatcagaactagaacccaagtgcttattataagtagaggacatgcaatggggaagtcatttaggtcatgccaaggaaacacaacgggttcatttaagaaatatttaatgctcattacaaatggtcaggtactgatgcctgacacagagggacacaaccacgaacaagacagactgggcgtcttgtccatacaaccttacatcctagtagaagagggagaggacagataaccagttatacagtcatagattgtgatttgtaagaagcaataatggctgggggctggggtggtagccagagaagacccctggcaaggggccgtttcagccaagaagcttgaaggagatggcaggagccacgaggtgagctgggaagagcattcaggcaaggggaacagcaagtgcaagggttctgaggctggaaagagcatttcaagttgggatacacatagaagccagctaaggccagagcacaatgaatgggaagagggaggccagggccagatggcgcaaggcattgtgggctatggtgaggaggctggatcttattctaaggatcatggaaacccatgggaggttttaagaaggaggatgtggccaggaacagtggctcacgcctgtaatcctagcactttgggaggccaaggtgggtggatcacctgaggtcaggagtttgagaccagcctggccaacatggcaaaactccgtctctactaaaaatacaaaaattagccgggcagtagtggtgcatgcctgtaatcccagctattcaggaggctgaggcgggagaatcgcttgaacccggggggcagaggttgcagtgagccgagattgcaccacttcactccagcctgagcaaaagattgaaactccatctcaaaaaaaaagaaaaaaaaaaggaggatgtgctggtgtgcagggaccctgtttctaaattaccaagattcttccggcccctctgtgaaaaagggagattatggtgcaaggacagaggcaggcgatcagctaggcacaggtgaaaagtgatggcacctaagtatgtcagtttcctattgctgctgtgacaagttaccacaaacgaagtggcttgacacaggtttattctcttaccatcctggaagtcagaagtcctaaaatcaaggtgtgatcagggctgcttttttttctggaggctctgggagaggattcgttcctggccttttccagcttctagaggctgcctgccttcatcggctctcgacccttcctccatcgtcgaagccagtggtatatcaatttcaacccctaactccgtcgtgatgccctcagtccaactctccctcacaaactctgtcattcttttttttttttttttttttttgagacagagtatcgctctgccacccaggctggagtacagtggctccatctcggctcactgcaacctccgcctcctgggttcaagtgattctcctgcctcagcctcccgagtagctgggactacaggcatgtgccaccacgcctggctaatttttgtatttttagtagagacagggtttcaccatgttggccaggctggtctcgaactcctgacctcaggtgatccatccgcctcaggctcccaaagtgctggaatcataggcgtgagccaccgcatccagccttgtctgcctcttctaagggcttgtgattatatagggcccaactggctaatccaagctacactccccatcacaggatttttttttttaaccttgcagctccagctcaaaggatcagacttcctaacttaaattacacctgcaaagtcccttttaccatgaaagtaacatatttacaggctccagggtttcaggcttgacatctttgggggctgttattcaactggccacactaggactagaatgggtggtagagaggagggaagtagacagattggcgcggtgacttggaggtggacatctttgaaggatcagaggagggagagggggaagtcaagatgcctcagggttgggcttgagcacctggatggactgggtggatgtttgtgttatttactgggatgaggatactgatgagagccactgggggaggactgaggacagcaagtaagaaacatactttctccttcaatatagagtattcttttatgtccatggaatcattagacacacaatgagagaagcaccaagcaagacatgccaaatctgttctttatggagaatcatgaaaccttcctggtgccacaagaaacctccttaccaggggcaaaccaacccaagccaagaagtaattgtcttctactcctacagataggagacagcaactccatagacttaagtatacagtaaagtattactttatattttgtaggcttagtatcctactaagcaagtaattcgagattcctgaaatttggaaccattataaaaaatctttaattgaacaaattatatatagaaaaatgcacaaatcctggctgggtgtggtggctcacacctgtaatcccagcactttgggagaccaagatgaggggatcacttgagtcccggagttcgagaccagcctgagcaacatagtgagaccctgcctctatttttaaaaaagaaaaatgcacaaattctaagtgtactgcttgattaattttcataacttgaacacactcttgtcaccatctccctcctagaccaagaaacataatggtaggggaacccagagcctccctcatgctctttcccatcccccaccccaccccccgggaggccctgcaaactgtgaacctataaaagaaagccatgaaaggaaataagcttattcttagaaattttactatcagttttcaagatgcagccccaatcaaacatttttttccccttcattatttagtttgaaatttgggtccccactttaagtggctttactataaatggcattttcctgctgccagagatacttgcctagctgaccttagctcccctggctatgagaattgcatcctggtagactgattttcagatgggaggacaagctaaattggccagaattaatgcaaagtgaaaggctgccttgaatgagccgagctcagaaattcagtgttaaggctttcacccggccttatcttattacatctggggatttctgcttggcccagctgacatggcatatggagagccgagggagagacccacagaccacacaggggacacttgccatttgacacgcttgaagagtttggaagaatgttcctgcagcctcgggaaggaaggcttcgctgatgaatagagcagcttatgccagtggaccgaggtgattctttccttctgtttctcagccaggggtagctgcagggcctaaattgagcttctccatcactccctgccttcctcaaatatttttgagcaccttctcttcaccagcaccgggaagacagcactgtgaataaggtagacacattctttgctcctccaaagcccccatcgttgctttgaaatgaggagagtagtgttaaaaaacgaggtacacagtgagaactagcgacataatttgtaggttccctgttcaaaaactactaataatttcattgccagccaataaattgtcacacagttgaaaatgatatgtcacaacactcctttattgtcttacagttctggaagtcgaagtcctaaaatcaagctgtcatcaaggctgctttaataaaattaaatttgcaccaaaaccaaccaaacaaaaagaatatcatgatgacagcggagcattcaaccaagcacaaggccctctgagcatgcggccctgtgactgcacacgccgtgcactcatgcagctggccttgaactcaataatatagtgtagggcactccgccatgtctggagacattttgattgtcacaactgcggggggaggggaggtgctactggcatccagcagggagaggccagggatgctgataaacatcctacaatgtccaggacagcccccatcgcaaagaatcatctggacccccaacgtcaattgtgtcgaggttgagatattctgcttttatcaatgacagtttcaatgtaggccagaaagaaaaaagaaattctgagggttttatgaaagcatacatactgccggggggcttgctttgtctggggaaggcctcttggagaaaaggacctttgagctgagacgtgaagaatgcgagcgaattagccaagccaaaaaaaggaaaaggaggtagcagatgttgggattttagagggccaatgcttcgcatccttttctttcatactgaggttcagaaccaagtgagaaagagatgcttgagttaggaagacgatgaaaattccacctttatgagtaagaaagctattaggttggtgcaaaagtaattgtggttttgtcattaaaagtaatggcaaaaacacgggccaggtgcggtagctcatgcctgtaatcccagcactttgggaggcgaaggcgggtggatcacttgaggccaggagttcaagaccagcctagccaacatggtgaaaccctgtctctactaaaaatacaaaaattagttggggtgtggtggtaggtgcctacaatcccagattctctggaggctgaagcaggagaatctcttcaacccaggaggcggaggttgcagtgagctgagatggcgccactgcactccagcctaggcgacagagtgagactctgtgtcaaaaacaaacacacaaacaaaacaaaacataacaaaaaaacaagtaatggaaagaaccacgattacttttgcaccaacctaatatttggggactatgtttaggtatggccagtcttgctaacatgctgtcccaccctttcccacacacatactgtcccagtctgcaggtccaccagagggacagagccgccctgctgctcagcagacaaccccccacccccaggccaatcttaaaaagaggcaagaggcaaggcagagcacatatgcccagttccttctctcaaactctccagctggccacatcagtcatccttcctggatgggcgtgggaaggtggagcaagacagagagacaccaggacttactctggggcagcactctccactccacctcagctgcagagtaaaatggcttggggcactttttttttgagatagagtttcacttttgtcgcccaggctggagtgcagtagtacgatcttggctcactgcaacctccacctcccgggttcaagcaattctcctgcctcagcctcccaagtagctgggattacaggcatgcaccaccatcctcagccaatttttgtctttttagtagagatggggcttcaccatgttggccaggctggtctcaaactacaggcctgcgccaccatcctcggctaatttttgtctttttactagagacggggcttcaccatgttggccaggctggtctcaaactcgtgacctctggtgatccacccacctcagcctgctgggattacaggcatgagccactgcgccccgccgcttggggtgctttgaatagtcctgttgctcaggcagcattccagcccaatgaagccagaatctcaggggtcaaacgttggtatttaaaagtttatttattttttattctttgagacactgtctccctctgttgcccatgctggagtgcagtggcacaatcatagctcactgcagcctcaacctcctgggttcaagcaattctcccactgcagcctcctgagtagctgagactacaggcacctcctaccacgctcagctactttcaaaaaattgttttctgtagagacgaggtctcactatattgcccaagctggtcttgaactcctaggctcaagccatcctcccaccttggcctcccaaagtgctggggtaacaggtatgagccagcaactgtggctagcctcattggtattattattattttttaaagagttccccctcccaaggttgtcagataaactacagaatgcccagttaaatgtgcatttcagataaacaacatcttttttttttcttgatgcaagtatttcccaaagattgcatgggagatacttacattaaaaacatatttgctgtttacctgaaatgcccattttactgggtgtcttatatttattgttgctaaatcaggtgaccccatgattccagatgagcccagtgtgcagccacattggagttgactgctgttttaatggaagtgcctctccaaggaaacagaaagaatgggaaataggtgtccttccacaatctcccttccagcattggttctcttgacccattaggtataactattaggcctttggacacccaagggtgggttgcctccatggggcgatagtggtctctgaagccattcctggctttgccttcttgaactccaataccagccagtgctccttgtggaaactcctagacagagtggcccagcagtgggcttggaaaggcatgctcattaaatcaacccaaaggctactcttcactgacaattaattccctatttctttcccatctcaaattatgtgcagctttgttgtccagtgtggctcatcagaggtttggtaatgagattaaatatactctcataataaaagccaacagtatatttcatatttgaatataaagtcttcattatattccctgggacaaattaatatccaaagattccttgtaaccaaaggcacaattgaagtccaaaggaattaaaggctgaactcaaatactcttgcccacctcccccccgccttttttttgagatggagttttgctcttgttgcccaggctggagtgcaatggcacaatctcagctcactgcaacatctgccccctgggttcaagcgattctcctatctcagcttcccaagtattgggattacaggcatgtgctaccttgcctggctaattttttttgtatttttagtagagacggggttttcaccatgttggccaagttggtcttgaactcctgacctcatgtgatccacccgcctcggcctccaaaagtgctgggatgacaggcatgagccaccatacctggtcccccttacccttatgagctgtaagaccaaaacaattagagtccaaattcatcttccctgatttcttatctgttcagtctcagccatgtggagtctcattatgatggtcaggtagaggacccttcagtagctgcaacctgagctgtttaccctaaacaggtgtgattcctttaggatctcaaaggctgaatgagtctccaggagccttcttaaagggttgaaagagagatcacgcaagaaggaaatagcagccctagccctgtgcccacgactttttctgaagaagccagtttcagccctgagcagaccgtgttcccctaacacaagcaaaatgatacacccacaacccacctcctggtataatccaggcccatgttttattactgctaaagataaaagcagaaaataatactggttccagcttcatcaggatgcaaggcagtctgtgttttgtgtccacatgtccacaatccatgaatgtaaatccagttggaacaggggtcagcatgcttgttctgtaaagggccagaataaaaatattttcaactttgtgagccatatgatctctgctgcaatgacacaactcaactgctacactgtgaaaacggccatagacgatacttagacagatgggcatggcagtatttccaataaaactttagtttcaaaaatgggtggtggcctgtaattgcctgacccctgaattgggagaaatctcccatgaaaaggttactttttaaatttttataatttcttggctgggcacggtagctcacgcccgtaatcccagcactttgggaggccgaggtgggcggatcacgaggtcaggagattgagaccctcctggctaacatggtgaaaccccgtctctattaaaaatacaaaaaaattagccgggcgtggtggcgggtgcctgtagtcccagctactcgggaggctgaggcaggagaatggcatgaacccgggaggcagagcttgcagtgagccaagatcgcaccactgcactccagcctgggtgacggagcgagactccgcctcaaaaaataaataaataaataaataaataaatttctttagagacagggtctcattctgtcttgccgtctggagtgcaatggcataatcagcttgctgcagcctcaacctcctaggctcaagggatcctcctgcctcagcctcctgagaagctggaaccacaggcttgtgtcaccacactcaactaatttttgtattttttgtagagatgggcttttgccacattgctcaggcttgtcttgaactcttgagctcaagtgatctgctcaccttggcctcctaaagtgctgggattacaggcatgagccactgcgcctggcccatcagacccacttctgaaccaggcttggactcagtctgtggttcctctttgatttgtcttatctttactgaacctatcattagagctggggttgcataaggttttcaggcctgttcttttggacacaggcaagtcctgtgtcctcacccgaaaaatcatcacctggaaatcatccaataataattttgatattttactgtgatattctcctctccagtcagtaccaagctagcttcaggggacagttctcttctggctctttatttgggctctctctctctgcagcttttagagttttccgtatcttgcctccatcttcagaggctgctccagtctgccaagatctgaccttttctcctctggaggatttgtttgggtcctagtagcagtcaggtgttctccctttttcagataaccctgtaggggccaagaaacctgggtgtagtctgttgtcctttaagattttggtcttttagctcttatttgcctcttcatatggtccagctatcttctaagatgttgatatttttcctagggaaagatcttaattcatctttggtttaatcagcctttctactgcccttcttttatttatttatttattctcacccacacaagggcatggccaattggaaatcatcttaaaattctgactgccacataattttatccataaatgtttctaaaacataaggttttttggttcttttgagatggagttttgctctttttgcccaggctggagtgcagtggcacagtctcagctcactgcaacctccgcctcccaggttcaagtgattctcctgcctcagcctcctgagtagctgggattacaggcgtctagcaccacgcctggctaattttttgtatttttagtagagacagatttttaccatgttggccaggctggtcttgaactcctgacctcaggtgatctgcccacctcagcttcccaaagtgctgggattacaggcgtgagccaccgcacctggtcaagatttttttttaaaaaagcaactatctacgggtgccatggcttatctacaatcccagcatattaggaagctgagatgggaggactgcttgagcccaggagttggagaccagcctgggcaacatagcaagaccctccccctaaaaaaatttttaaaacattagctgggcatggtggtgcacacctgtggtcccagtttcttgggaggctgaggcaggagaattgcttgagtccaggacgctgaggctgcagtgagccgtgaccacaccactgcactctagactgggctacagagcaagactctgtttaaaaaaaaaaaaaaaaaagcaaatatcacaaaacaattcctgtacccacttttaaattgaacaataatacttgttattttttgagacagcttctctctctattgcccactctggagtgcagtggtgtgaacatggctcactgcagcctcaacctctgcagctcaagagatcctcctgcctcagcctgctaagtagctggtacatgccatcatgcctggctaatttttgtatttcttatacagaaggggtctcgccatgttccccaggctggtctcaaactcctgggctaaagtagtcctcccaccttggcctcccaaagtgctggaattacaggtgtgagccactgagcctggcctacaataattctttaatgacattaaatatcctatcagtgctcaaacttccaataggctccatatcaggataaagaaaaccctggtttgtttgaatgagtatttaaagtccacacattccaattgattgacatgtcttttgtatatcttttttttaactttttttgtcttttatgtatcttttaatctctagactttcccttccactttttcttttcccttgacagtatgtttgttgaagaaatggggctgtctgtcctgtagcgtttcccacagtccagattttgcagctccactgtgtagcttaacatgttcttctgtcctctgtatttcctataaactggtaattagatctagcagcaggatcacattcaggactgaggttttttttcttaagacagggtcttgctctgtcatccaggccggagtctctaactcctggctgaaatgatcttcctgccttagcctccctcagtcttatattcataattttgtaacctttttcccagagggggtctttgcagtattaagcttcagggtctccaagtctggatctacctgtccctagccttttttttttctttttatttgaaccggagtttcactcttgtcttccaggctggagtgcaatagcccaatcttggctcactgcaacctctgcctcccgggttcaagtgattctcctgcctcagcctcccaagtagctgggattacaagtgcccaccaccgtgtgtgactaatttttgtatttttagtagagacagggtttcaccgtggtggccaggccggtctcgaacttctggtttcaggtgatccacccaccttggtttcccaaaatgctgggattacaggtgtgagccactttgcccagcccctagcctttcaacgaattccctccatagctttaattccagcaacgtcttgacccgcggggccatacaatccccaatcccactgcctgcacactgcaccctgcccgttacaatcccccatcccaccgcctgcacactgcaccctgcccattacaatccccgatcccaccgcctgcacactgcaccctgcccattacaatccccgatcgcaccgcctgctcactgcaccctgcccattcccattacaatccccgatcccaccgcctgcacactacactctgccctttacaatcccccatcacaccacttgcactctgcaccctgcccatgttttcactttcctctattccagctgagatttcatcacccactgctagaatcccttccttgctcatgctgtgtccttgtttctcggcaaaaccccaaacttgatgaaacccaacttcccagtctattcctgcaaatgtgcagctcagcacagcaggagaaacaacatcagttgactgtgttgctgttcagtcaagcgggcctgtgggctgccccccgggagcgcctgcttgagaatgaagccaagagcagggcagagtggagcccatcctggcagccaccctttcccagctggtctaactatgggcccaggatgggttcttactgggcacactgtagcgagcagggctggggtattctgattggccaggcctcagccataggcccatccctggatctggactgggggttgggtaaatggggtcagcaccatccagtcccatggcctgcaagttggggagagggggttcttgttttaaaatgtaggttttattattatttagaaatgaggagaccaacagatcaggagacaccctgttattgaaaagattgttgctgccgggcatggtggctcacgcctataatcccagcactttgggaggccgaggcgggcggatcacctgaggtcaggagttcgagaccagcctggccaacatggtgaaaccccatctctacttaaaacacaaaaaattagctgggtgttgtggtacacacctgtaatcccagctactcgggaggctgaggcattagaatcacttgaacctgggaggcagaggttgcagtgagccaagattgcaccattgcactccagactgggggacaagagcaagacttcgtctcaaaaaaaaagaaaagattgtggccaaagtgggaagattgcttgagaccaagagtttgagagcagcctggacaatatagcaagaccctgcctcttaaaaaaaatcagccaggtgtggtggtgcacacctggagtcccagatactcgggaggctgaggtaggaggatcacttaagccagggaggttgaggctgcagtgagctgtgattgcaccactgcactgcactccagcctgggcaacaaagttagacccgttctccaaaaaaaaagaaaagaaaaaagaaagaaagaaaagagtgttgtatacacagatcccaagaggaaggggcatgacacaccatggagaagccacacctggaagtaccatggttggtcgggaggcagaggtttccagggaaaaacaggggcagaaagcttcccgctgtggctgtgggaaggaataggtgacccaggtaggcaggcttaggatcggctcatctgaataatttcagtgagctctggggggggtggggttggtccctcgttgtccggtggctcagggtgttagtggccttagggcaggcacacagtggctaggagtgtgacagcccagtagaggaggtgctgctggctctggattggttggtttgtatttgaaacacatgttcacagtccaattgtttactgtctctaggaactggctaaccctgggaggaaatgtactttctgggtcagcaaggtcccaagatgtcaaagcagcaaaaatacataataaaagacatgattaacatagttctccacaataaaatccaggctttacgtgcagaagtcaaggcagactctgcgcagctagaaacaaaagatgtcccctatagaaatgcaattctagaggcttctggccccaagggaggactctgctaactttgcccgtatttatcttcacactcccagaaggaccatctttctttgtcctggggatttacggcacccacacacctcctgattagtcccatcttggaacttctgacgatatgtccaggtcccctctgggcttctctgccccaggtcactgggtctgaggagccgcatctgctgccacccattcattcctcatcactgtcagcaaaagtgacagttgacagggattgcagttctcacttctggcaccaggccctcttgtttttatttaaaactgtccagaaactgtgcctgctgtcgccaggagcgggggctaatctgaacaatgtgagatgtttgtcttcaggcgttaacaggaccgttagtcaccttagagggccgggcgctgtacgatgtgagagacgtccgttcaaggcagctgccatttagaccgtttctgccgagaggagactgtcaggctttgagacactctgggctgtttaagggactttgccctttttgttctcaactccttattgattgggatccttcccaaaggagctgggcattcattagaagctgcagagtagaagacacctcctttctggttttctggtttaatggcaccagaagtgggaactgattaatcaaggaggttttgtgcttggtcccggactgtgtgcagggagggagggctccctgcgctaccttcctccagcaatgctctggtccttggggcacattcttttctcttctctagcagcttgtttttatctcttctttcgttccagcatgagtttctgcacacccatttaacatttttccctttctgctctagactgcttgagtggtttcccctggtgctgggctgatgtttgggtttctgtgaataataattttgggatcatcttgatcttttcgagtccacagaattttggtttgatacactaaacttcccctgagcccaccttgccaaacccgctcttcctacggccatcccctgctccaaaagtggagcctccatcctctcaggtgctgaggccacaaatcttggaattgttcttgacccctctctttttcttttttcttttcttttccttccttcctttcttcctcctcctcctcttcttattcttcctcttcctcttcttcctcttcctcttcttcttcttcctcttcctcttcttcttcttcttcctcttcactcttgctctgttgcccaggctggtgtgcagtagcgtgatcttggcttgctgcaacctctgtctcacaggttcaagcaattctcctgcctcagtctcccaagtagctgggattacaggcacccaccaccatgcccggctaattttttatatttttggtagagacagggtttcaccatgttggccaggctggtcttgaactcctgacctcaggtgatccacccgcctcggcctcccaaagtgctgggattacaggcatgagccactgctcctggcccctctctttttcttattcccacattccgtttgccatcaacaccctatgggctgtaccttcaaaacatgcagaatcttcctgcttctcatcactcacctggtccacataccatcacctctcagctgaactgttaaagtcacctcctctctggtctcttgttcccagagggaacgtgttaacacctcaggggtatctttttacgcctgtgctgaaaatgccccccttctggcctgctgcaatggctcatgcctgtgactcccgcttgaggccaggagtttgagatcagcctgtgcaacatagcgagaccccatctctacacacacacacacacacacacacacacacacacacacacacacacatgattacctaggcatggtggtgcatgcctgtggcctcagctgctcagggggctgatgccagaggattgcttgagcctgggagttggaggctgcagtaatctctgagaatgtcactgcactctgcctgaaaacagagcaagaccttgtctctagaaaaaagtcaaacagaaaaccaccctacgctggctctcatctcactcagggtaaaagtcacattgcccagaggactccgatctgccctcttcctctccagcctcaccaccctgcttgccctgcccccaccaccttatgtctgtgcctccaacacatcaggcatggtcctccgggcctttgcatgggctgttccttccactttgcccaaatgtcgctttctcagggaggccttccttcattacttaacttaaatcatgtattcatttattttattttttattattattaaatttgagatggggctcactgtgttggccaagttggtcttgaactcctggcctcaagcagtcctctggcctcggcctcccaaagtgctaggattacaggcacgagccactgtgccaggtcaacttaaataatttaaaattaagacatgccaattacaatcgcatctcctcttgggcttccccgctttgtttctctccatggctccgtcaccatctgacgtagtacatgctttccttgtttatttgtggaatgattgattgaatcactctggcaaccatcttatagtctgaataaggtttggaatattcgatgactctttaaaaaaaacccctgtgtgatgtgtctgagtttttgagtatgcctagaagcacatctagaataggcccctcctttgtctccagctctcggaggcagtaaaaattcatttgccaatttagtggctaaaggaatgagtaacccgttcctcttccctgtgagtgaaacgttccacttatattgtgtctacacattctttgcaaatgtcagttggaatgaatgaatcatgggctgagggattgcaccatatgcagctgacccgatgactgaatctcgcctgtatgatgtcaccagagtcagtgatgtgggagggttcgtaggccagtggtgaccccctcaaatgggaaaagttacttcattgggaggtgacctaccctactcagaggccatgctgaacttgggctgtgtggcacaggtcaagggtgtaaccttcggagacacttctgtctgtccttaagtcacttcacttctctgagttcccttgtgtgcaaagtgaggctagtgttcatctcttcaacacacatttgtggaacaatgtgggctggagatgtggagtgagccgggcaggtgtgacacctgtttccttggagctcacagctggtgggagaaatagacgagacttcgggaaagacagacaacaattgcactgttgggaccggcttgaaggaaatgagaaaggacagtggcacagggaggtggggactggcaccaacaggaccctcgagggagacgggacctggcgcagacatgcgggtgggagtgagccctctggggtctgggtggaggcagcccaggcaggtggaggcaccggcaaaggcaaatgctccgaagtgggacagagctctgtgcgtttgaggaagaggcagggccagtgtggctggagtccggaaaggagagagaggggacaggctaaagtcagggttagaggacgcagggccaggccactgtgagaagtgtgggctgtgttctgcggacttcctgaggactgggcggcgcggtgtgtgaagcccaggggtccagccaaggacactccttccttccgttgggactgggccagcagggctcaacaggacacccctgccagagcaggagggcctcctcggtgggccctgtggcttcctcaatcctgcagacgttcctgggagaaaaccagcttgtggcagggctgtgcagggctgggaaaccggagagggatttcagggtgggcacagtgcggggctggccaagtttgggtcgccttccagctttgagcacttccttaactattgaacagtggcagcgaggtgggtgggctcaccggtgagctccttcagcacggcagggatgcatttctcaggtcgggccatgtggagcatcccatcttcccatgggaccaactcttctcctaagtcagtccccggagggaagtgagtgacagcgctgacctcagcagtttcagaatggggggattggcaggacagctactgtccattaccaggagggggcgccagatcactttaaaacatttgtcattctgtacacttgtgctttaaaaaggcacattctttaaaaccatttttttgttgttaaacaactttagtctgttttgttttatagcataatggctatgaagtcttagattttctgtactggtttagtttttcccttaatggacattaaaataaatacatcccaaccaccgcaaccatagcaattgttgtgaactgcgagccagttctaacagctgcataaatattaactcatttaattcacaagatcagcttatgaggtgagtactattattatccctgctttacagatgaagaaactgaggcagaggttactgggcttggcctcggtccctgctgtggcaggtgtcagaggtgggattggaacccaggctctagaatcagggttcagctctgttgcctctctaaggattgaggagcagaggggcttgtggttcccaggtgtgtgcagccagccttttctaagctcagctgtatgcacctggcatctcttagatgctgtcatgtctagagcctggagctggggctgggattggggcaaggggccagggattcttagataagtaagacctggtagccctctctctgccgaggggcaccgggtctgggggaagaaggtggatctctatccagcagtgtacagacagcagggaggtgggaattggaaccagtccttgctcagggctctgaatgtgccagcaactttcagacagagacccccccacccatccccaccccagtgttgccccagccagtgaccaggatgagcaagagccccaccctgactgtaaccatggagccccacccagccccggaggcgtcagctgcatcattgccgctgccctgacaactgtaaatactgtctttagtcacatgggcactctgccttcagacagaaagaacaaccttcttgtcaaatactgaggcaaatttatcttggacccgggccacagtgttgtgaggtggaatgaaagctgtcactttgttcccagctcaaattgtgctcagagctaaacacccctcctctctggcctcagttttcccatctgtaaaatgaagggcttgaattggaagacctgtaacttctctcccagctttgatattattattttttgagttatcctcacaagggattcacttctctttttctcagagaggaacctgaattattgatgctttctcgaaatttggctgcctcaggcttggagatttcagatgcccccatccatcaaaagtagacaggattatacattcatgaggatagatactatcaaagcaacagaaaataacaggtgaggatgtggaggaattggaacccatgtgcatcgctggtgggaatgtaaaatgcgtggccgcatagtgggtgggaatgtaaaatgcgtggctgctgtggaaaacagcatggcggttccccagcaaattcaaagtaaaattgccatatgttccagcaagtccacttctgggtatatatcaaaatgactgaaaataggattatggagagatatttgcacactcatgtttacagaagtattatttgcagtttccaaaaagtggaagcagctttttggtatccattgacagataaatagataaacaaaatgtataatatatgcataatggaatattgttcagccttaaaaataaaggaaattctgacacaagctacaacatggatgaacctggaggacattatgctaagtgaaataatccagtcacagaaggacaaacactgaatgattccacttacataaggcacctagagtagtcaaattcacagagatagaaagtacaatggtggttgcagggattagggaagtggggagaattagcgtttaatggatacagagtttcagttacacaagatgaagagtcctggaggtggatggcacaacaacgtgagtgtatgaacactactgaactgcacacttaaaaatggttaagatggtaaattttttggtcatttttttaaaccacagataaaaactttttttttttttttgatggagtttcactcttgttgcctaggctgggaatgcagtggtgcaatcttggctcactgcaacctctgccttccgggttcaactgattctcctgcgtcagcctcccaagtagctgggattacaggcgcccgccaccacgcccagctattttttttttaattaaaaagtaaactttaatgtgaaaaatgcaaacttgaggagggcagaaagatcacacacacggctgtcagttcacacttggagggttgcacagcccggcagaggcgctcctcacttcccagacagtgtggcggccgacgcctggctaatttttgtatttttagtagagatggggtttcactatgttggccaggctggtcttgaactcctgacctcaggtgatccactctcggcctcttagagtgctgggattacaggtgtgagccaccgtgcccggcaaatactccccgccatgttttttttaaagagacagcctgttgcccaggctggagtgcagtggtctgatcatagctcactgcagcctcaaactcctgggcttaagtgatcttcctatgccaggctccagtagctgggattataggtgtgcacatcaggctaacctttttaaaaaagtagacaggatcacattttttcttattagaggtccagctatttagacagtgcaacacaaaagttcaaggccgacaggaagaaggcgtgtgttgtggaatccacagtgggtgtccacaggacagcgcagagactggcagtgctctgtctacctgggagggaattctgagcagggaggactctgaacttgacctagtataactttttttagaaagcaattatgtagtcacttgattcgtcatgtatttcttttttcttcaacaaatgtaatgagagtctactaaatgttgtggcttcaaggattacacttcagatttatttaaactttccaagttgaactttattttttctgtttctattttttagttttttaagatataccaagttgaactttaaagaaatgtttgtacatgttaaaaaaaaatccaaacaatataaaaagataagaagtaaaaagtatctcagtaccataagataaggtgagaaacaaacaaacaaaaactaagtatcccttctatcccaactcctagaccaccagcttgcttccccagagcagccatggttactagagtcctgtgtctcctttctaagatggtgtgtgcctacacaagcagagatatgcaaatatccctctcttcaatacgaatgtgagcatacattgcacactgttccacacaccattctacaccttgcttttttcacttaacagtgtacctttttttttttttttgagacagggtctcgctctgtcacccaggcgggagtgcagtggtgcagtttctgctcactgcaacctccgcctccccggttcaagtgattctcgtgcctcagcctcccaagtagctgggattacaggcatgtgccaccacgctcagctcatttttttttttggatttttagtagagacaaggtttcatcatgttggccaggctggtctcgaactcctggcctcaagtgatctgcccgcctcagcctcccaaagtgttgggattacaggcgtgagccactgcacccagctaacaatgtacttttgagattgtccagatcagtaacatgtagataaactgaattcatttttaacacctcagttaacctcccactgtctgcatgcactgtaaccagattaaccggtgccttttaataaatgggcccttcgtctgtttttgtgccctagttcctttttggcagtctggtgaaacctatggacctttgctcagaaaaggtttttgtttgtttgtttttttttttgagatggaatcttgctctgtcgcccaggctggagtgcaggagcgcgatctcggctcactgcaacctccgcctcccgcgttcaacaattctcttgcctcagcctcctgagtagctgggactacaggtgcccaccaccatgcctggctaacttttgtatttttagtagagatggggttccaccatattggccaggctggtcttgaacccctgaccacaggtgatctgcctgcctcagcctcccaaagtgctaggattacaggtgtgagccactgcgcctggccaaaaatatttttattttttattgtattaaaactatttatttatttatttattttttgttgccaggctggagtgcagtggcacgatctcggctcactgcaacttccacctcctgggttcaagcgattctcctgcctcagcctcccaagtaactgggactaaaggcacatgccaccatgcccagctaatttttttggtatttttagtagagacggggtttcaccatgttggccaggatggtcttgatctcttgacctcgtgatccacccgcttctgcctcccaaagtgctgggattacaggcgtgagccaccgcgcccgcctcttttttcttttaaaaacagtgtttcactctgttcctcagtctggagcgaaatggccagatcatagctcaccgcagccttgaactcctgggctcaattgttcctcccacttcagcctcccatgtagctgggaccacaggtgtacaccaccacacctggctaattttttaatttttttgtagagatgagcatctcgctatgttgcccaggctggtctcaaactcctgggctcaagtgatcctcacgcctcagcctcccaaagtgctgtgagccactgtgactggcaggaagatgtttttaaatccataaagtaaaatacgtaacaatgcaagggaaaccaaccactgtgcggaaatacaatcctatccatgaatcctctgagagtctgtggccctgagataaagaatcccaaccagtttctaggcttttttctactacaaactgctgcaacaaacatttttgtacatatatccactagtttctataggataattttctagaaatgtaattactggggcagaaatcatatgcatgttatgtttggatcaattttgccaaattgtcccaaaaagtttgtgtcaattgtgcaggagaggacctctttctctactccctggtgacaatgaagtataaagctttatgaattctcccgttctgataggtgaaaaattgtctttcactgtaggtttttactgcattcttgttttatgagtgatgttttataagtttaaaagtgttcccatcagtaaatgttattcttttgttggtggaattgcaggttattttcacttaaaaaaaaaaaaaccctgctgttttcatgtatactctcaattttctgccataagaaagcattttgtttacatgaaaagggggtgggtatttggaaagataatattagtcctgaagagtggtagtgaggatgtaattagaccaaaaatagaaggatgcttactttctattggggtcaataggtgatgaacaggtagaaaacacataaacaataatttaagctacaaatgaagtcagtcctggtgatgtggtaaggagggactgggtaggtagctggtgatggcttctttaaaaaggttgccagggtaaaacctactgcggaggtgacatttgagttgaggaagaatgagaaacaggcaggcacgtgaagacctgagaaaaggctgtattcttctcatgcttgcatgatccaggttttgggattgacctctgttttttttttttttttttttttttttttttttttgagacagagtctcgctctggagtgcaatggcgtgatctcgcctcactgaaatctccacctcccgggttcaagcaattctcctgcctcagcctcccaagtagctgggattacaggcatatgccctcaagcctggctaatttttgtatttttagtagagatgtggtgtcactatgttggtcaggctggtctcgaactcctgacctcatgtggtctgcccacctcggcctcccaaagggctgggattacaggcatgagctaccgtgtccggctgggattgacttctgattcgaagttgaaaccataaaactattgtgaagagatcccaccaagtgcctaaggatggcatagaccagctgttagaggcggcctgaatgattttctcctgccgatacggacggtccaaaagaacatttcctttttcctttgtagaaatgtacaaacgtgggtatttacaagcagcgtcagaggggagagcttggttttgacccaaggttgtagttcttgaaaggaccagtaggtggaggtgaaggacaaggaacagacactacttctgccaagccatccaggccattgcaatctaggttgagccagccgcttcccgagtctagttaggagtataggaatgcctgtttctggcacattaaccagtctgggcatacatgagctctaaagcagggaagtgaatgaacatgcatatagcatgtgttgtggcccaaggaactctaaggctttttttttttttttttttttgcatttacaaggaaactcctctttccttctgtcatataaaccaggggtcacacagggaatgtaaatgaattaagaaggtgtggggtaaagaaacacatgctctctccaatgactttcattttctcactttgggttagaaccataagaatagaggaaggtttttctactgtaagaaggatcacagccctaagcagctacaaaagacacactggctggagagcaggcagtgacggggactgcccctagctgctgggacagtgagtcaagggacagcccgtgcccatcagctgagccagtgggaatacaggcctggtgctgcgaggggttcactttttttttttttttttttttttttgagatggagtttcggtcttgttgtccaggctggagtgcaatggcgtgatcttggctcaccgcaacttctgactcccgggttcaagtgattctcctgcctcaacctcctgagtaactgggattacaggcatgcaccaccacgcctggctaattttgtatttttagtagagatggggtttatccccgttggtcaggctggtttcgaactcccaaccttaagtgatccgcccgcctcggcctcccaaagtgctgggattacaggtgtgagccgccgcacccggctgaggtgggcattatcatttgcatgcccattttacagaggaggaaactgaggctccgaaaggtgatgcagctctttcttagccacctgcattgctgtcctttgaacatacattgcttaggctgccatgttgacagcctttgggctccagccccggcagcctctatttcctgatagccttcgattcacacatgcgggttgccagtgtgggcccagtggctttacatttgagtttccgaaccatccccctccccctgcaccgccccagttccctgagacctttggggtcaatgtggggtgggtgagaaacgcctggcggattcagagggttctgctctgtggttcttgaccagaatctctggtatcagggcccaggcattcataaattttaaaagccctcagaaaattctagcctgagcagggctgagaaccactggggagcttaagaaagtcttagggtagctgagtttgatgagtcctctgattgcatgctattcactcactggattggctgtgggtctttgcaagtgtgtactgagcagggcacaaggtgggcatcaggagagtggcggttgtgcagagtggggttgccagcacagtagggagtcaggaggaggcagggaagagcattccagaggaacctcaggatgtgcacaagtctgtcagcaagagaccctggaaggtttagacatgaaccacgataccatcagcagcagcttctccggatcgggcctccctgcctcagcatgctcatgtgctgattgcaaacccactgtgtgcccggagcttccaagagagaagggagaggcagagaaggaggaggctggggaggggagctgggaccaagccacagagaactcaaggcctccctacacctcttagactttatgttttttatttttatttttttgagacagggtcagcctgcagtgcaggggtgtgaccatggctcactgcaacctcgacctcctgagatcaagccatcctcctacttcagcctcttgagtagctgggaccacagatgtcaccacgcccgactaattgtttttattatttgtagagaggagttttcattatgttgcccaggatggtctcaaactcctgggctcaagctgttactggacaaagaagtcttgatccagaccccaatgaagagttcttggatcttgcacaggaaggaattcaaggggagtcggagagtgcagtgagaggaagagtttactgaaagctactctgttacagagtagggtgtcctcagaaagcaagcagaggaatgcatcatctttgcttttctttctttctttctttctttctttctttctttctttctttctttctttctttctttctttctttctttctctctccttccttccttccttttttctttcttcctttctttcttctttctttctttctttttctttctttctttctttttctttctttctttctttcttctttctttcttttttgctctctctctctcttttttttttttttttttttgtgacggagtctcactctatcacccaggctggagtgcagtggcgcgatctcagctcactgcaagttccacctccgaggttcacgccattctcctgcctcagcctcccaagtagctgagattagaggtgtgtgccaccacgcccggctaatttttgtatttttagtagagacagggtttcaccgtgttagccaggatggtctcgatctcctgacctcgtgatccacccgcctaggcctcccaaagtgctgggattacaggtgcatgccaccacgtctggctaatttttgtatttttagtagagacggggtttcaccatgttggtctcgaactcctgacctcaggtgatcgtcctgcctcagcctcccagagtgctaggattacaggcatgagccaccatgcccagcctaagctttgcttatatagaggtcttgtttatgcaaagactaaactaagctatgcctgcatgcgggtgagcagacagcatgacaaaatttattattctattgagttaaaggaaactatccttgacatttttgggtgggtacatcaaagcataactattattatttagaaaacatatattgttatgggtattgggacatttggattctctgttgttataggggcatgtccttgcaggcagctttagttgttccctctactataaacatcccatgactatgggtggtgaccagcaaggaatgtgctttgctagtctcaaatggagcggaacttaaaatggtgttactctggccctgttatgctcttactttcctaacaaagcaatcctcccacctcagcctcccaaagtgttgggattacaggtgtgagccaccacacccagccgactgttaggccttagtcagtcggggagccagggtcttctcactgggaattttaggcaccagggccccagaagctggcagaggtggttgggtcagtagcagggatgaccaatcatcctggtttgcacaggatgttgagtgctaaaactaagaatgtcctgggaaaaccagaatggttggtcatcctagtaaaaactcagcttcccttaccttactctcagccagctcctggtcccaccagtgtggatttatactagcttttcaaatgtcgctgtgtgcaccaatcacctggattcttatggaaatgcagactctcatccctcaggtctggggtggggactaagagtctgcatttctgtgttttttttttttttttttgagacagagtctcactctgtcgcctaggctggagtgcagcagcgcgatctcagctcactgcaagctccgcctctcgggttcatggcatcctcctgcctcagcctccggagtagctgggactacaggcgcacgctgccacgccgggctaattttttgtatttttattttttttagtagagacggggtttcaccgtgttaaccagggtggtctagatctcctgaccttgtgatccgcccccctcggcctcccaaagtgctgggattacaggtgtgagccaccatgcccggccacatttctgtctttaaactaaattaattaattaattattattattttagagacggggtttcactctgttgcccaggctggtctcgaactcctggcctcaagtcatcctcctaccttggtctcccaaagtgctgagattacaggcgtgagccactgtgttcagccgaatctgcatttttaataagcttccaggtagcataggtgtcgctggtccatggtcacaatttgagtagcaagagttgacagcaccctcaggctcattgcaaaccagctacttccggccataactaggagagagaagttgtgaccaccccaaaagcacatctgtatttcctaaggcaaatacaagccagctttccctccactgaactgtccaggactcaggcttgcagtgaaaatcagctgctgaatgtatttttgtttaaaatccacacacattctctcacactagttatttaaaaaaattaaaagaaaaatccacacacaccacatgcagacagcacccatcacaggtgctatttagtttgtttttcaattgcttggtccctcctgcttgggtaccatgtgtttgcattttgcattttttgcttctccttttatctcactttcttttcacctcgcagcaacctggtcaatgtgcaaatgaaagacagtcccagggaagaggaaaactcttgctgtgcaaccagctggaaagagattgaaataaaaactcacttcacttctccccaccccattctctcctgagcaagtagaggcaggtttgtcgaaattgccggaagggacaatgttggcatttgagcttctaggaatgttcttttggagagcaggagcactgcctccaggcctgctccctcccactgctgcttgggaaggatggctccaggactgggcggctcagccatggtggaactgggtcagctgtggctttggcaagtttctcatcctatctgggccgcctctgtgaaataggaataatgattgtacctacagagctggatattacctgtttgttcccccgacccattctctaccctgagagaccgactttagggattgcatcactcaagggccctgccttccggcttcggccctgcctttggccttctggttcagtttgcaacgggagataccagcagcagatgggtgctgggaaatttactccctgttctctccctgctctgggctgcagctgtgagtttctctctgactgcagctcctgaccaggcagatgcctcaacagtgccaggcttgacggtgtgtgtcagctatcaatttattgcctctcagctccaaagtcacccttcaatatctgctttgcgtaatgggcggagttccttttaagcgtcattcctttacagtgagtgcagtgttaagttttctcagtagagggcgctagaggaacaccccctaggtctctactgttttcatccctcatccgctttcagacaataggccaaggcctggccaatcagagcactgccttctcatagcctcactgattggctcagggatgggcacacggtctaaactgctccaatcacagtgagtcccaggacttaggtaggagctacccaaatgataccttgtgctttcccattgaacttgaacttgagaagatgagaggctgggttgctgcagccctgttgtcagcatgaggggagagtcttgaactgccaagaatcgccacagggaactcaagggtggagccaacatggcagaagttgtgagatggagagaaactgacttctcatgacacagtgtagctgcccctgaagctggcaggacctttgggcttttcagctatgtgaacctgtagataacctctctccaaccacccccctcaccagtgtttttttggtacagaagccagttggattttctgctatgtggaaacatagttctgctgaatataatggctttaggaaagaaacaaaacaaaacaaaaaccattgctgtatttatcctctttgccaggcaccttgctgcatatctcatttacttctctctccatcctcacgcagccctcagaggaaagtgatcatctccattttccagatgagaaaaacaatgctcagagaagttaagtaactagctcaaggccacccagctagtgtgtggtagaagcaggatccaggcacgggctccagtgcatcataccactcagtgctggctggcagcagagtggaagccactcgtccacctggctcagggattctggcagccacggtgggagaaagcagggatgcaatctgtatgccgagtaattgtacaacagtgcagttcccccacattcattacctaactgctaatgaaaagatctccgaattgtggtgctgccaagtctgttgtagcgaagtgtgagaatgcatttgtaattagccgcgccttgcaggcaaatgaggaatgtgtgaaagtcccttgaaatgttatacaaaataaggctaaagcatattccattatcttacgtatgctattaattgaacagacccttttcattgttgctgttgagttcttgtgtgacgttattaacaatagttactatttattgagcacttactatggcccagatacttggtgctttctgtactgctttgtttcatgtaatcttcacatcactccaacagggaggatgttattgttccctttttaaagaggatgaactagaagttcagggaggttcaataacttgcccagggtcacaccgcaaggcagtggcttgtcaaggaatcaaatttgaagttctctggctccaaagcccacgttccttctgtttgtcccagcacttgtcgtactttctgctgctctagcttgtcccactcacataatagtatgtggctgttcagtgtggctccttcaagtgggagagagggcccttctctgttcttcctgttactggaacacggatgtgactgctggatctctcaatttattctgtcttgaaagcaaaccacgaaattaagaaaattttgtggattgtctctgcctaaagacccatgtgcttggccgatgagactgctaagtccaggtttaagacactgttattgtaaagggtgtcgataggccagaaggcaaaatgctgaagttcacaggacgctgcctggacttctaatttggatttgggtatgtatcagccagtaaaaattacagaaacccaaccccactaatttaagtaaaaagagaatttatcagataacatgactaaacagttcaagaaaagggatgtcttcaggaactgctggatctagggacttatcgttgtcattagaacctagtttttttctctctattccttgactctgtattcccagaggaagagagagagagtctttgctgtttgggcctataaaaatccccacacccattttgaggaaggagtctaagactggtagctctaaagtgtcctcaaggacccaggctcccatctttctgttctcccaccctcagtccttgtcttttatccttgtggtcacctaatgaatggtccaagagggctattggagatccagcaatcacatctatgttccagtaacaggaagaaaaaaaagggccatctcctctaaggaggcttctcaaagttccctgcgagactttgcttacaaattcctggccaggacttattcatctgtacacaccttgttgtaaaggagactggaaagtacagtctttattaccagtggcagtgtgcctggataaaactggggctctgttactaaggagaaagggggaagtggatggttggatgggccactagagtttccgtcacagtgcccatcaccagatactcaggaaatggatgctggggagagcaaatacagcacccactaaagttggtagtcagtgttgtgcctgggcctaatagctcctccttcatgaaatgagtgttgttgtacaaagagccctggattggtcaaaagattggattacgaattccagcctctaactggctatgtagttgcataacaacactttgcttctttttttttttttttttttttttgagacagtgtctcactcttgcccacgctagagtgcagtggtgcaataaggctcactgcagcctcgacctccctgggctcaggtgatcctcccgcctcagcctccccaagagctgggactacaggtgcacaccaccacacctggctcctttttatattttttgtagagacagggttttgccatgttgcccaggctggtctcaaactccaggcctcaagcgatccgcctgcctccacctcccaaagtgctgggattgtgggtgggagccactgcaatccttggtgctcagctcacttggcttcttgtgtctgcctttctccggctataaaatgggggtcatactcacatcatctggctatgcctctggctacaagcggagaatgcctgactagcagtagggtgagcaactcatcctggtttttgtatgccttttctaattttcacgtgaaatattaaatgtgagatgaagcatcctgggaaactctcttagtcctgggcaaactaaggtagttggtctccctcattagcagtagctaaaatcctagagacaagcattgtctggaggtgggcagtatctgggtgagttcagcagctcaatgctatcttcacggacccagtaggctctttgcatcctcagatccaccacccttagcatgttaggtttccttcctcccactggctgtctccagtcacaagtgtgactatccagatacagctcttgtcatcttgggtcagactctctgcaaatcccctagctggggatttgggtggggtggggtttcatgtgcatgttaggtgaggattcaagtgaatgctgtgaattgagggagtgctcttaggagaatcctgtaaaggaggagggaggcaggatggggcaggggaagaagtgaagcaaagatgtggtctcagcgggagcttcgctggagcctcatccccagggagcaccaagtgtgatcagagttgcagactaagctccaccttgaggcggggtctgaagacttgcccccctgtggccatcagtcattgccatgagctgccctggtgaggtggggacttgacatcccaggcatctctggatgctttggttcctgtcagagaagaggctgctgggagttatgacaacacagaagggggctgctgggtgcaccgggcagggtccccacagcttcttcgacccttgtcctctctcaaaagcacccaaggcagaaaggggtgcaaaggcttgctgtttacagagggaaagtttccccagcacctagtgatctcaggccagcttcctctaaggtcttattagccgagactgggtcacttctcatccctgatgactcactggtaaagggaatgggattacctcagttggcataaacgctgggactgagcacactgaaacctgggacaaacgaagggcctgtttgtggggaagaagggtgaacaggtttcttgcaggcagccagcagagtctgccctccaagcaccagggtatccagaagtcccagtgcagataacaattctgcagacataaggggttttacttgtttcccctctagatctttccctggttcctgcaggtgagtatgtgagaattgcgtaggagagatgggcaggtcctcctgcagagacacactcatcgctctcccagaccctgccccgagattctgggcaaacaccagctgttgctttgggcttgtggaggaggctgataggtctactggaagtctttcctggaagactatcaatcagagatttgctttcagctgaacctcccaatttagtctctgttgaaagccaaccacagcccagcagcttggatgggatgagattcaatagcagagggcaacagaacaaaggtctcgctttatttccactgcctcccctcccttccccatgacagtctccagacagggtggttgagtgccactgctgagtaatttttatggcaattgcaaaagacccctgagcttctaaggtgaggcatttcccatttaatcatcttgatggagaagcagcctccgtacatttagcagccattctggccccctgttaaatggacttgttactactttgttgagtctcaattacaaatgtggtagaataacgacagctaccaaataacacagacccaggagatagtcctggcatttttgctttttttttttttttttaaacaagaccagttggtggttttacatttatttcaacaaattgagcttggacttttacaggtcatttgggtgaaaggcacactcctttctgaaaagaaataagaaatctttcaggctgtgttttgtgattgcaaacacaagtcccgctgtatcttttcatacatttgattcaaaatacaagaatgttgatggaggactaacctcacacgttggaggctgtttcccagcagaaatcattaggtgatctgttgggggaggagttgtttgcctgccataattgtggcatctgtaaataggcatggatcttaataaaattcatgccaccgtatatgtgaacaaatatggctgatgcatgtaagtattttggagtgctctggacagaagtaagggattcacagattcacttatcctgcaaatatttattgagcaccaactataagccgaccatggagctgatcatcaattgaggagaggaaaccaaaaacaaataggtatttatttatttattttgtgtatttacattttgagatggagtctcgctctgtcgcccaggctggagcgtagtggtgcaatctctgctcactacaacctctgcctcccaggttcaagcgattctcctgcctccgcctcccgagtagctgggactacaggtgcacctcaccatgcctggctaatttttgtatttttagtagagatgggtttcaccatattggccaggctggtcttgaactcctggcctcgactgatctgcccgcctcggcctcccaaactgctgggattacaggcgtgagccactgcgcctggccgcaaatatgtatttaatgtgtcagttgataatacggattttagaaaaggataaagtagggtaagggggctgggtgttttaaaatttaggtttggtttcattcaggtttggtgaggctaacatatctggtgaggactgctattgaaaagatagtttgctactcacagttcccaagaggagggtggcatgccacaccatggagctgagacacacaggggcacaccaaggccagttaggaggtggggagagtatgggcaagagtgtttacagtggtttctgtggagaggaatgggcacgggacagggtgagcaggtttagggttggctgatttgactaatttcagcaggttctgggcatgagggcttcctttagctgtctggtacctggccttggagtgcttaggccaggtggacagtggcctggagtctgagagctcagtaaaggaggtggctggggtgtgcgttccgggttctgtggcttgcataggaaaggtgcattccaggcaagttgtttactatctctaggaattggccaactctgggaggggcagtccctccagggtcagcaaggtcccagaccacagagcatcagagtacagaaaaaaagacatgtttaatacactggggacatggtgggagtgtggccttttatacagagctggaagaaggagccagatgaggcctcattgtttaggtgacattggagcagagacctgagtgaggtgagtgagtgagtgatgcgggtctatcttcaggaagggtcctccaggcagagggtacagcaagtgcaaaggccctgaggcaggatagtgcttggtttgttcaatgcatagagaagaggtcagtgtagccggaaaggagaggtgaaggggaggcaaggagaccaggtcgggggctggggctgagagagactctggcttggattgtgagcaagatagactgtcagagttggggttggggaggcgcaggggtgggactctgagcaaaggtggagtgtgatcagactggggttctaacggggtcctcctgctgctgtaggggagaggcaggggagcagggagaccaggaggcgctcctgccaccatccaggagggagaggacaggaggagagtggtaggattccggatataggctaacaggactggatggggagggggtgagggaagagagtgagagataagtattagtgggaatcctgtttcttttttcagaatgaaaacagaggtgaggccattttagcaaatggtagaatctgagtgaaaatcctgctttcttcagctgatgtctttctaggcttctgcggcctcatccctctatcatcccacatgtgtggaaatattttattcactcggttttctccctccaccaaattaccagcaactccagggcaggactgagtccagttctggccccgctgctgtgacagggcctggttcacagtagggactctggaaatgcacctctgagacctctccctgggcgcatccccgcagggggctgtgtctctgcccacgtgttccctcgatggctggtggaatgtccctgtcttctccacctctgggcctttgcactgtctgtctcctctgcctggactgctgcctctccctctcctccaggtctccatttaaatgccacctcctcagcaggtccttccctcattgcaccatcggaagtggctgtgccccacttggttactctgccaggtcacccttgtgttcaccaacatcagaaattgttttcttctggtcacaggttcactgtctgtctctctgttgccatccctgtgtggaccccacgaaggcaagggcctggtctccaatgctcactgtagcattggagggggtgtcgccggtacccaccctgatgcctatcaatgggatgggacacctgtgccccagcagctgtggtattcagtgccaaagacccccacctgtacttctttggagaccggctgattagagctgtcttgccaggacacaccaggggcgtcgggacaagaccagaacaaaggtaagtggaaagacagatcctttgcaattttgaaatgttatgcattgtgaattttttggcagtaattttgatttttaaaaatattacattaaagtatgattgatctccactactgatttcttgggctttcccttgcattttggggcaaaggcaagtgcctcactattcccagccctgctcagaggtgggatctgagaatctgtattgttaaatcagcctttctgacctcaactgtgagtcccagagaagcactgagctaatcagacatgggggataaaccatatgacctacaaaataaaacacatttggaaaggtctgttttgctgtttcccccagaggagtgatggtcccctaagtgtatggagttagttgtccataccagggtcaaaagggagtcccattagggacctcccataaggaactgtgtccccacactttgatcagaacagctcttactccatatgatttatatctgggctttctgcatcagattccatgcaaaagataggttccattgctaaaaagaggtagaaaagtcacaatcttagagtggcagtgctggaagcagattgttaggtgtccagaggcctcctagcttcagatttagggccaacagcccctaagccccgttccaggcatgagggtcacgatcgggagtacctttgtccctctctcaagtgaggtcttgagaggtgcccaagtccgtgcctctgcctcagccaccaggacaggtcagaacctgcaagatgatgccagaaaccttgaccactcaggggccccggcttccctgcacaaccccagcttctgttcctcctccctcccagtgctgttccgttcagggatccctccccgaccccacatggctttacttcccccctcccctgaattttaaagggctccattttatacttctttcggtaccatatttctgtgtgtttagcattttcagtggcctcctgcctctcatagcccctttccaggggaataaaaggtcattccataaatctcaggcattattaaagatgacggcagtgcacgattgcttgacacccaccgggctggggaacgtagcgctaattagtcagaaaacttacttttcaggcgtgagtcattggaagcaggtgtcaagggagcctttaacgaggccctcgtgactcagttgatatttccactctgcatcaccgcgtgtatattgtactgagatcgcggtggcctcgccaccagacacagagggcagaggagagagagagagagagaaagagaggaagagaagagaaagagagggagagagaggaagagaagagaaagacagggagggagagagaggaggacaaagaggagcgagaggggagagaaagagagagagagagaggtgcttggagaacccgagatcccatgttaaaaataaatgccttctgctttttggccctctttcctatttcccttccttcttttttaaattaatttacttattttacttaaagtcagggtcttgctctgtcacagaggctggaatgtagcagctattctcaggtgcaatcatggctcactgcagcctccaactcccggattctagggattctcctgcctcagcctcccaagtagctgggactacaccacatctggctaacattccttcaataaatgtttattgagcacctactaggtgcaggccctatgcgagatgctgggggtcaatggtgagccatattgctgagtcctgtagctaagaagaggaatacatgagtcaatttcagaggttgatgggtggatatagaagaccaagccggctaagaggagaggggtggtggtggtgctgatgtggattctttgagaggtggtcagggaaggcctctctgggaaggagccagctatgcagtgttccacaggaagggcatctctggcagagggatgggcaggtgtgaaggtgctgggatgggaatgatgtggcttgagggttaggacaagcttgtgactgtgacctgagtgggaagccccctccccacgcctggcactgaggggctctatgtcctgccagctggagtagaatctgctggactggcctgagcgccctctctactgtgggtcacatatgctgtatgaagtcggggacctgttgcaggtggggtgggtactctgaaggtcgcaggttgggtgggtgctctgcaggtcaggcgggtgctctgcaggtcacagattgggtggatgctctgcaggtcgggtgggtgctctgcaggtctttgggggcacggggaggcctgtgggggctgcagattgtgcttctcagtctgcccagggaactgtaaactccctttcaaaaacatctgtccccgctctaggtttagatttatatgcaggtatatgatgcaaagtatttttttttcacagattaaaataaatgcagagtagaatacaaaccccacatgattttttaaagataaaatgaactgatttcacctcatagtcaacaacgctgacaggccccctgatgacctgtcaactgtcaggggtgcctttgtgtgaaagtttgaaaaaccagccctaaggggtgaaaaaggtgaatagaggatggaagagaaggaaaaaaggataaaagggaaacgggagaaagaaaggcacagagggggggacagtccaagagaaacgagagagggagcacagtattcactggtcattttccttaaagtgtctgttctctttttctacaaccccagtagggccccaccgggcctgaacaacccaagcacacagggccctttacttccagcccccacttgctggctttgctgggaaacccagctcccttttttaagacagccccatggaaggcattctctctttttcatcaatttcttttccctggacatgatccacattagagacagacatgctgtttctgctgtttgtattttttttttttttctccaggcagacccataaagcaagtttttgctgggcatgttatttgcatggtgaaaagaacaaggcatctccttattgagggaaacacacataggggctggggtgggcggggctgggctgatgacccagcttcctttcacggctgcaggcggaggggcagggcccctctgctgatgttctagtgttcttcccggggtgtgggagtgagggtgtccttccccgggtgcgtgggagtcggtgctgcgccaggactgcactcggaagcggcctgtccctctccaggcgtctgcagtggatggcaatggcttcgggccacagatggcaggcagggcaggcgtgtcctccgcgctcagttattgtctctggtgtccgaggaggcacttccgaacaagatgtcactgtcctgggacacgctcagctgcgacttggttttgatgaggaactgcgccctccggaacatcaccctctcttgctcctgcttgagctccaggtaggagcgggagaaggtgtggaagatggaggtgactgggaaggccatgagcaggatgccgctcaggatgctgctcagggccactacctggcccggggtgctcctggggaccatgtcgccatagcccaccgtcgtcatggtgatgacagcccaccagtagcaggcagggatgctggtgaactcggggctgtcggccatctcgttctcgatgacgtagagcaggggcgcgaagagggcgatggccacgcagaggaagagcagcaggagcccgaactcgcgggtgcagcggcgggccgtgagccccagcgtctgcagccccagggagtggcgcgccaggcgcatcacgtacaggatgcgcagcgcccgcagcacgcgcagcaccagccccaccttgtccaggtagctgttgcccgcgccgggcttgcgacggcctgcggcggcgccgtccaccagcagcgtgatgtagtagggcaggatggccaccaggtcgatcagcgtcagcgggctccgcaggaaggcgaacttgctgggcgcctgaatgagccgcaggaggaactccagggagaaccagcccacgcacaccgactccacgatgaagacgttgtggcacatctgggaacagtggccctgggagagaggggaagggacgccggaggggtcagcgggccctccaggaaaggagggcagaagctctgccctgtgccctgctgggcttcccaggcggaaggtgacctctccaggttgagtggccccgggtcctctccctagttgtgcccactccgaggcctggggcactaagcaccatctctacactggccgctcctcatctctctctccagcccccacctcagccctgaactccagacccccaacaggctgcctccctgacgctcccacctgggtgtctgaggggcatctcgaactcaccatgggatcctggtttcctctgcccactggtggtttccctccctagctttaggcaatcccatctttccaatggcttaggacaggagacctggcgtcatccttaccaccttgcgtataacccccaggaagtctcttcatttaaaacagtgcgagaatcaaacccactgcccactgctcccacctggtctggccaccatcctttcttgcctggatggttgcagtcacctcacctccccgctgggctccctcatccctgcagtccattttccacacatagccagagggatcctgttcctcctctgcttagcaccctccacggctcccgatggactgtgaggaatagtcttgttcagtgcccccatcactgccccgggcaaatttaggctgaggctgcctcaccgaagctttcaaaagaggctggaaatgtgcagttttacatgaactctcctggtgacaaatgttggtgataatgttggttaaatagataaaatgttgatttaagtcctggtgataattcagtgcaaagaaatactctatgggccactaaaacacatatttttgttgggtttggcatgcaggctgccagcttgcctctctggtctggaatataattgggtggtaaacagtcctttagtggatttgggcctcatccttgaaggggcctttggcagagaggagaggccagtgtggttccagcctggggcatcttggaggttctggggcacagctgagttctacaagtcccacttgaacaattctgtctctaggaatatgttagaggctggagatatgaactaatacctggtggggctttaaggtcttagacctctgggatgggaagccccttcctctgggaagctttcctggagcgtgccccactaagtagctccagcagtgtcagtgggcctcccatacagaacctccttggcttgtgtctcctgcttatggtgatggggggggtgggtggtgccactactccatcccaaccccaatagacttgaagcttcttgaggttggaagacttgtcctggtcaccctgtctcccctgtagtgcctgcatacagtaggcactcaaatgtgtgcacaaggagcatgtgaagcagtgaatcctactgcaccccaaaatgaagttgaagaacagcattttcactgaatccttaaaaaggcaaaggtattattatcttttcaaaaagcaagtatcagaagttgaacaaaacagtggctttattagtattttcctgataaaatcacgatcaaagatgttgaagctgagaagaaatttacactaagtacagcaatttccagacaggtctcaaatggtgagcactttccctttcctttctttttcttcttgaccctaatccttaagagaggactttctgcacattcactatgcatcgcttctaatcccttcatgtggcgtggactcagtcagcccaatcacttctttttttttgctcttgttgcccaggctggagtgcaatggcgcaatctcggctcactgcaacctccgcttcccaggttcaagcgattctcctgcctcagcctcccgagtagctgggattacaggcatgtgctaccacgtccggctaattttgcatttttagtagagacagggtttctccatgttggtcaggctggtctcgaactcccggcctcaagtgatctgcctgcctcagcctcccaaagttctgggattacaggcgtgagccaccgcacccagccccaatcacttctaatcacttcatgcgaactcactgaatccttgcaacactgtgaggtgggcctgttcatacccgccctggacaggtgagaaatcagaggctcaaagagtttaagtaacttgcccacagctactacacagctagagaggagaaagcaggatttgaattcaggccatctggctctagccctgatctcttcatcactacccttcatgcttattgaaagttgattttaccagctgggtgtgatggcatatgcctttagtcccagctattcaggaggctgaggcaggaggaatgcttgagtccaagagttcgagtccaacctgggcaacatagcaacacccccatctctaaatttttttttttttttgagacagggtctcactctgttgcccagacttgagtacagtggtgcaatcttggctcactgcaacctccacctcccagattgaagcaattctcatgtctcagcctcccaagtagctaggattacaagcgagtgccaacatgcccagctaatttttgtatttttagcagagatggggttttgccatgttggccaggctggtcttggactcctgacctaaagtgatccacccgcctcagcctcccaaagtgctgggattacaggcgtgagccaccacacgtggcctaaaattgttttttttaatttaaaaaagtttaaaaagttaaccttactggttgaatgctattttcttaatacccatttaaaaattcaacttataagccaggcatgagggcctacttcctccacatacataagtggaaagatcctgacacggtgagtacttctaatgttaaattcgagagtgcatgtaaatgagacatgagaatcgcttcaatctgggaagtagaggttgcagtgagccaagatcgcaccactgtactccagtacagtgtaatcttagcactttgggaggcagaggtgggaggatcgcttgaagccaggactttgaggccagcctgggcagcaaagcaataccccatcttttaaaaataaataaataaattcaatgtataccaaaagtaccagtaagcctctgtggattattaatgcaacagctactgctacttcctccacatacataagtggaaaaatcctgacatggtgagtacttctaatgttaaattcgagagtgcacgtaaagcacttagcacatgcagggtatacagtcagtgctcaataaatattggctggcatgatatttacgttcagttcacaccgccatacctatttctccactgcctatacaatttgtacctctgaaaacttttggtctttcttgaagcttccagaatccccatatacagggaaggagtcaccaactcaaaggcccatgatctcatacacaaggagactgaactgggcccctgtggacttggatctccccaggaggtgccatgtaggaccgcaggctggtgtatatgttggtggcggggcagggggaggggagggacccaacctcacaatttttaaaaaaattttgtgttttagagatggagtctcactctgtcgcccaagcaggagtgcagtggcgtgatcatggctcactgcagccttacctcccaggctcaagcaatcctcctgcctcagcctcccaagtagctaggactacaggtgcaagccaccacacctggctaattaaattttttttttccgtaaagacggggtctcactacattgcccaggctgattttgaactcctgggctcaagcgatccttctgcctccagctcccaaagtgttggaattataggtgtgagccaccacacctggcctgatcttatgattttttttaaaagaagctgagattttgaatttttatatgaaaaaacttcacttttattgttggcaaccaagtcaaatttttgggaaaccttgtgtgggccaatcacatagtcctgtggggctatattaggtccccaagctgccacgtggacaccatatttccatgcttacaaagacagactggacttagacctggggttgggcagtgtcctcaaatacctagtgggtgtgaaaacacttcccccacagggttgctggagcattccctagggagataagacgtagttggcacatgcagcccagctccggctcccgtgaactcccagatgagtgggagcccttagactgtagcacacaccccgtgtcaggccctggagtaaataaactttccattcattctcttatgtaacaaaaagaaatgctcaccatttgtagacacacatatacctatcaataaaaattatcttcaggacccagaaaatgtgtctgggctactatgatgcaaaggattaggaacgttgagaaaggaccgaatggttgagataaatttgatgatatatgtaatgtgcttcgctcagggccaggcacgtcaaaaatcacaccacccatttattcactcatttgttcattcaacaaatagtggttgagtgcctgtttgtgctggacactgttctaaacactggcaagggggagggcagtggtgggcacagtggaggccaggacaggcacaggcgtggacccccatgatgctcacatattaacagggaggcagaccatgcacacaaacattcctgatgtcaggagggaccagggatgctattcagccagtgtgcaatcagaggaggctttctggaggaggtgacaatgctcagagtcccttccctcgtggtggcgcgtttccccgcggggcgtgggctcttacctgctcctcctcctccctcaggctgggcaaggtgctgacggagaggttgacggcggtgacggtcacgaagagcaccgacaggcaggcgaacaccttgccaggcagccccgagtgcggcctctccaccatgtcgcgcagtcgccgcatgcagcgccccaggcggccctcgccctcggccgggccctcgctgtcgcggccctcgctgtccagcgcgtcgtcctcttcctcccgctccaccatctccgcgaactcctcaatcttctgcaggtagcggcgcttgcagcagccgtccaggtggtcctccgcgatgccccagtacagcagctcctcctggaaggacagcgcgcacatctcgcgcagcagccgcagcttgcccgcgcgcaggaaggtcaggatagtgccgaaggcccccgggttgcggtcgaagaagaactcgttgcaggtgacgtcgtagtcatcgcacacgttgaggatgtcgtcgaagttggtgcaggccttgagctggcccaggcgcgtcagcgggaactcgtccagcgtggtccagggcagcgagtacttgatgccgcctacgttgatgatgatccgacggcggcggtcctcgggctgacagccctggcggggctcatcctgcggccgcagccgctgcgcccggcggtagaacgcgcccttgatggcctggcgctgcgggaggaaggccgggtggaaggaggcgtccgaggtgcagctcagcgcgctgtagtcgtagtcagaattgtctcccggtaagagggtcattttgggccttcacatccctctcgggcctgtggggagaagggagggaagaccctcagtgaccacccctagcttcaccttgctgagaatgcagattccgcagatattcactgttagggatggaatctttgtcccccacatccataggttgcaggccctagccctcaatgggatggtattaggaggtggggcctttgagatgtcatttggttcagatgtggttatgagagcaacgcccccacgatgggattcgtgttcttataagaggaggaagacaggccgggcgcggtggctcacgcctgtaatcccagcactttgggaggccgaggcgggtggatcacctgaggtcaggagtttgagactggcctggccaacatggtgaaaccctgtctctactaaaagtacaaaaactagccaggcatggtggcgtgcacctgtaatcctagctactagggaggctgaggcatgagaatcgcttgaacatgggaggcgaaggttgcagtgagccgagatcatgccactgcactccatcctgggtgacagagcaagactccatctcaaaaaataaaaacaaaacaaaacaaaacaaaacaaaaaaaaaagaagaagaggaagagacactagggctttctctctgccatgggagcactcagggaggcatctaagtgtgaaacccagagaagagtgctgctggcgccctgctctcagacttgcagccggcagaactgggagaaataagtgttgctgaagccacccagtctgtggtattaatatttggttacatcagcctgagctgacaaagacattcacctaatagtgaaatagcaacaacattgttcagcatctcccagccttcacaattctcccatatccatctatgcactggggatgcagccgtgtgcagaatgtgaaggggtctctgatcccaggcagctgacatcctagtggattttcaggtgacacatgtactgttatttacttaacattttattttaaattaacttttttttttttggtatttatttggcttggaaaaacaatttagtgtagacctacagttctcatagggctgatttagtctcccaaaagacatgtggcaatgcctgggagcatttttgctggtcatgactggggttgctattggcatttagtaggtagaggccagggaatgctgttgcatgtcctacaatgcacaggacagtccccacaacagacacttgtctggtcccaagtgtccttaatgctgaggtggagaagcctggttaatggttatgaacgcagactttggagccacacagcctgggcaagtgactcaaccttgatgtgtcttaatttccttgtctgtaaaatgggtacagccacgtgatttgataagattgctgggaggcctaagtgaattatgtacataggagcatttaatgcagtgcctggcacatagtaggtattcagtaactattgtctattattattattatttttgagacagagtctcgctcttttgcctaggctggagtgcagtggcacgatcttggctcattgcaatctccgcgccgcgggttcaagcaattctcgtgcctcagcctcccgaatagctgggactacaggtgtgccaccacacctggttaatttttgtatttttagtagacatggttttgccatgttggccaggctggtcttgaactcctgacctcaggtgatctgcccaccttggcctcccaaagtgctgggattacaggtgtgagctaccacgcccggcctattattatttatcttaaagggacaactaatattgtttccattaatggaaaacagataccacttgccataaatcagaagcaatggacaaagaaatgcacaactatgaaagcaatgccacgtttgctcaggggtcagcaaacatcaccttgaggatgcagggctgaactggacagccatgttcatccaggaagccttccttggctcttccagctaaaatgagcacccctccccttacaactggtgcacccgtcttcacggcacttaccaccagttctagaattgtctgtgtgcaagcctggctccttcattaggcagcctgctccctgggggaagaaacgtgctttagtcatctctgaatccctatgctcagcactgtaaagcctcaaagaggtgcttgttaaatgagtacatttcttgttgacgagaccaacatgataaggcgacttctggggaactcaggtcaaaatatcaacttgcatggactccttccttcccaaccctcaaagctaagggtttgtgctactggaacaagattgcttattcattaccagctcatgggctgaatttggttcacaaatattttgcttggcttggagaagtttttgaaagttgagaaatttcatgtaaaaatccatatccttggcttcttttaaaaaatcaggatatctggcaacacttggcccaaacgccaactgagaaatggctacccctttaggcagcacatgctccaatccaccacagtccccacccccaactattgtcttcctaacacccactctattccactcatgtgtgtttccttcccggccctataggcatttgagtttgagacccttagattatagccacagagctctctggaattaagccgatgcatagagaagttagtaggagtcaaatactctgcttttaaaaatcaccagccctcgaccgggtgcggtggctcaggcctgtaatcccagcactttgggaggccgaggtgggtggatcatgaggtcagaagatcgagaccatcctggccaacaagatgaaaccccatctctactaaaaatacaaaaattggccaggtgtggtggcacatgcctgaaatcccagctactcgggaggctgaggcaggagaatcccttgaacccaggaggtggaggttgcagtgagctgagatggtgccactgcactccagcctggtgacagagcaagactctgtctaaaacaaaacaaaacaaaacaaaaaaacaaaatcaccagccctctccctagacaaatccccaatggaatcaagtggtaaaaatctatcaattccaaacggaaacccatttccaatacttaaatatgggtcggtgctgtggacatgttcaggaagatactcgctcacaaacacacccgtacacaaacacatgtacctatgaatgagaaaatgttttaataggtgctggaaggggagggagggtgtttcacacttaaaaggggctccttcctaagaggaactgctttacaaaagcacatcatccctctactactcactgatctttggggaaggctacaattgcagagatcagggtttggaaaactagggtacacctgtgtttgaaagaaaaatgatttgattttagatggttagagtgtttttaacttcacctaaaattggaacccatctcctcaggcacagcctgccaggatcctttggaggcgtgggaataatccctttcaggcactttccttggtgatctctcttttcagctctgctgtttcatctttgctaccacagaaaagagaaaaagtgacattctgtttggcaagaatggtgatggaggtaaacggaaaatgcctcacacaagccctggagggctcttgtgaatccccatggctgtaatcacctcttctttttaggaatttcttctttcaaccctcccagctttccctccagcagaaaactcccccaattagtgatttatttccttcacgccctgcccccacgtgagtttcctgtgtggaaagtgatcctgtctcggcagcagggtgagtatggagaggctgatgctactcggagggtaataaacagagtaacgaccttgttctcaaagccagagtcccctggggaaatgctgaggccagaacttgctaaaggaagaacaggcatatttctccatggcctttggtcttgcagatacctgatctgatgtgagatggacggctcagcacctctagaccctacactaaagttcataaatcaaagaggccccaaagcctggccttctgaaaaataatactgcttttcacgcagcctgatatcctcacaagaaattttttatttctctgtggtgttagttctgttagttctacagcatggtgggtttaagtgattttgcctctgagggtctgtggatgcttggggagaggaagctgtttgaagcagaggctgcgatgggggagatgaggtgaagtccggaggcaggtgtcattcattcctttatttgttcgtttattcagtagttactgaacgctcaccacgtgtcagactctgtattagagccggagacacggcagagaacaagacagacctaggccctgtcctcacggaggtgaccttctggtggggaagactgtttccaaatgagcacacaagtcatttcaggctgcagcgactgcagtgttgttgacagagcaaggtgagagatggagaatgactattgtggggtgtggggcaacattggctggaggggtgaaggagggcttcttggaggaggggacatggggttgagccgcatggatagatccagccccgtgaggacctggcagagggagtggcaagaatttgctccctgacttgggggtgggcttggatgatcaaagaccagagaatgcagagcacagagcgaggggaagctgggagaagaggagaggggcaggggccaggtgcagcagggccgaggggctgacaataaggagctggggcttattctgcaagggacaaggagtccatgtgtgcctgccaggtcagtggacaacgagtgggctggggagcccaggctggaggctatggaagtcattctggaaatgactaaggtttgcagcggtggaagtcccagagaacaggagggatttgggatgaactttggaggaagagccctcaggactggctgaggaatggggcctgggggagggggaaaagagaagaatcaggattccaggggtgccatttaccgaggcgacggataggtggcgctatggtgagctgagtcagaggaagctgttcctggctgtgggattatggacagaagaagcagctggcaaaatccaggagagaggggggagatgggtgtctcccaaggacggtgccagaccatcaatgctgagctgatgggtgtgtgtttgcggggggtgagggtgtcacctggcagctttgacctggctaggctggcaggggccggagggccagggtagtagagctatggtgaagtcagaggtgggggcctcacctgtgccctgtgcccggtagccactgaagctgcatcacatcaggccagagtggtcagggcagggcatatggtaggcagaaaaatgtccccacattcccctagatgcccacgtcctaatcctaatccctggaagctgtgactacgttagactgcatggaaggaggaacgaaggttacaggtggaattaaggctgctacagctgatctgagatgggaaattatcttggatgatctgggtgggcccagtgtaatcaacagggtccttatttgtggaaaaagaaagcaggagatggagcggcagagggctgcggcatgagaatgactccactggccactgctggctttgaagatggaggaaggggccatgaatcaaggaatgcaggtggcctccaaaggctggaggccaggaaatgagctccctggagcctgcagaaaggagcacagccttgccaatactcgatattagcccagccagacccatttccaacctctgacctccagacctgtaagataatataattgggctgtcttaagccacccagtttgtggtaatttgtgacagttgcaataggaaatgggatgctgaggccaggcatggtggctcatgcctggaatcccagcactttgggaggccaaggcgggtggatcacttgaggccaggagtttgagtccagcctggccaacatggtgcaaccccatctctactaaaaatacaaaattaagctgggcatggtggcaggcacctgtaatcccagctactgggaagattgaggcaggagaatcacttgaacctggaaggcagaggttgcagtgagcggagatggtgccattgcactccagcctgggcgacagagtgagactctgtcttgaaaaaaaaaaggggatgttgaaaaaaagctggttctggttctggttctcctccagcttgggggacaatgtgccaaccaccctaagctgaagaggcagaagggcgcacaggctttaaaatcaggagacctgggttcaaggccagttgctctgtgactttaggcaagttgtgccctacccctgagactcagtttctttatctgtataatgaggctacaaacagctcctgcgtccttgagttacggtgaggacaaaagcagatggcacaggtgatgcacttggctccatgcctgacgctgagtgaaccctcaatagtcgccttggaattctcacaagctacgattagagtccgctgcccccctccctgcttcccaagagaatcttcttttctgacctgacccactgggatttggatccagcatcatctgatccccggatccaattgctagagggtatgcgggctggcctagcactctgggaaagccactgggcggtaatgagggaaatgaagatgctgctgccctgtgacccaggaatcccacttctgggtatatttcccagacctgggaccacaaagggttgtggcagacattgtcagtaataaattatttgcactcaaatccttcactcagggtttgcttctggggaaccagatggaagagagtaacaaacaaggtacaaaaatgtgtgttctgtgttgtttatggtaccaggaggtcccctagcatccatccccaggggagtggacaggcaagtcttcgtagaggcagattatggaagcctgcagattgcccaggaatcagaagcaatggactgagtggagatttagcaacacatttaggtcttaaaaacagtgtgccgagtggaaaaagaaacagaagtttctagcactgtgctatttatgtaaatgaacacacacacattacatattttacaaggtctcaagcacatgtgaggatctatattaaccacatggagggtgcctggaagggcagaggaaggggaagaagcgcggggattggaacaaagaagaaaaatgagtaagatgagacagcctggcacaggccaatgaggaggcgtgctgggaagcggtgtggtttgtacaactctgggttttaacccaggtttaaaaagaaaaacgaagagcacaggaacgacagaaccttctgaattgctcggggtgctcggtggagatacagatttctgggaccctcccttcccagtcggaatgtctgaaggggaggcccaggaatgagcatgttcacaggctctcatggagattctgtgtgagagaggggaccgggaatgcctggagttctcccaggggctggaggcacaggagctgctctgggctttcacctggactcccctgcccaacgtgtcaatctcctagaggctctggaaggctgtgagtcccgcttcattggagaaatgaaatcccttctggttcgtgagaaaaatcttctgcgttggggctgccttgatcaaatttccattcaggagcccagagatccactgacactctcctcgcaatttttctatctttcctttgaggaaaaggtgatgcttataagctatggctgagggctgagaacatacttccaaagataaatgatcattgagatcataaggcgttctgagtggcagttctcacgtgaccaccctgaggtcagcacatgactgagggtacaggtgcgggacctgtggggtgggatttgggagggcggaatgggatggagtgaaggtccaagccaggcatggctagtcgtccctgctgctcctgctaataaccctgtggcctgggcaggccatcacacccactgagccgctggcctctctgagcctgcctcctcccctagaagatggggataagattgctgacctcacggggctattatggggatctggtgaacggaggtttgctgcagggatgagcagtgtcactgggcctcctgtccccatggctacattccatcaggggcatgaaatggttctacagatggtcctgggctgaccccaactgctttcaggtctctctccggggttccaacaagctgcgggcctctctggaccctgttctttctgtcttatgctctccgtccctcttccgagtggcagcggggaatgcagagagagcgctaactgcacaaagtgttataaatagcagcaaccacagcctccctccactgcaaactcactaagtgccaggtgctgtgctaggagccttcattgcctgagtctccatcctttcctaaaaaggtgggcattatcactaatacccccattttacaaatgaagaaactgaggctctgagaagtgaaaacttatgtctggcaataagcgacaaagccagaattaaactagatctgtgggactccaggccgaacctctttgacccctgccttttactgcctccttgaaccacttgttcctttcggggagctggtgtggtgtctccaccccttgcagtgagtcagggactgggtttctagtctctatttcatatggacgagattttggaatgtttctgaggatggggagaagcaggcaattgtccatggctggggaaacatatttatcactatttatatttgcaagtgagcagagttaaaaaaaatcaacaaaacccctagttttgccaaactcagggttgccattttggcctctgggaaggagatgttgacgatggaggcagagggtggagtcgtctccagaagccctgctgataccttgattttggcccagtgagtcatttggtcttctgatctccaaaaactatgagataataaattcaggctgggcgcaggggcttacgcctggaatcctagcactttgggaggccaaggtgagagaactgcttgagttccagagttcaaggccagcctgggcaacatagtgagaccctgtttctacaattaaaaaataatcagctgagcatggtggtgtgtacctctagtcccagtgactcaggaggctgaggtgggaggatcacttgagcccaggaggtcaaggctgtggtgggccatgatagtgacactgcactccagctgggtgatagagcaagaccctgtcttcaaaaataataataataataataataaatttatattgctttaagccactaaatgtgtgcaagtatgtgaaaggaggaaattaacacagcttccaaggcaactttccagaaggaaagcatttctctcctgtactctgcaggctttggtttctctctctcgtaccatgcctctcaacctgtgccattccctcactcccagtgggtgtctcggggacccgtccgtctctctccatgccactctttcccaggccctgcagcgtttcactgccagtatagcttcatctgtcaggattagggcttctggccgagccgactcagaggcgggtcaggctgcattaatccccaattaaaacgttaatcaaaatggatccaaccattagcctggcccgggtcctggcatgttagatttccaagagctgctgtgccctggtggagaatatatctttcttagccacctgctgtctgttctcgccacagtcccaccaccctgggccttggcccagcctcctgaaagctggggcccaagttcctggggagattgtgtgctgggagctaggctcttccctccatccctcccttgcccccaaatgagaaaaagtgccagtgtccctcccccctataaaaaagacaggctgcctcgggagcctccctgctgtgctgcaggcaagcaaaataacaccaaatgcacgtttgcgtttgccttcttctacggggaggtgtttggggactggagccagaagatccttttctctttgcctccttgtagctcaaaattaagcagagaagcaggcttgggggagcagtggggacctcaggacggcaggaagggagacacctgcttaccagagtcctctggagggagagcatgatcggacctgcccggggaggtgtgggtatgagagtgaagactcacctcagggcaacggacagtcttaggcacaattcagatcctatttgtagcaaagtcacttcatttctgatttcgttaatcaaatacagtctgctggatgataaaaatggtccacagcaatggagtgcttcagctaggttcttcgcctctccctttttattaattctatttagaggggctttaccagctgccatttttcacccacaggctccatttctgggcttaatgcaacaaccaagggtagattcctgtacccctagacctctggcaacaggcaatgttgactcttcatcaacattggaaagcagggtggagaaaggacagccgagccaaggtacctactgcggctccaggaggtgagttcctcggagctggtttgcgtcgcttagccctgcatccagcacacatctctttgttcttctgtttcctgaggcacctccctcacctcttgccagagcccagctgtgggtctggtgcagagaattcaaagtggtgctcagatctgccccaatcaggctccaggacaagcttcgggaaagtctttggggatggggagaagcaagtaacctctgcctcccatgtcacatctccctcccagaggccaaaaaggcaacccagagtttggcaaaactaggggtttggttgatttttttactcccaaggtttgacaacccaggctgtaggctgcgggcctgggctctcaagtctcaggagaagaacctaggttgcctcgtttccagtgtgcttgcagttccctgcaggttaggagtgtgtcccaggacagacatctttcccgtggaacgggctggcttcgagaatgactgaggagggtgatccccaggggccagcgcttgcctgtttttcaaacacaccttccctccttcccctcctatcaggcgactctgcagggctccaaaagccgggggaggcacaaatagagctcaggtctggcagagcctgaaaaatcccccaaagaaggacagcatgccctagccacagtgccgaccgcaaggccccaatcagcagtgccaaacttttcttggagatgtgctgccggtgaggctcttcatagggactctgccatcatgggtatgggggtatcaaacacacactaatgaataaacctctgctcagattcatagggcaggaacttcccccaccccacaatgaatcagaccagttcctgctccctcctcttacttccccctgtacttatctcagggagtcagcaaagggggtgggggcgtctgtgtctgtctccctcttctatgtgtctgtcatttacctgggtaactttggtgcctggcaccctttaagtgcttaataacagcgagtgcttaagaaaatgcctgctgaatggacaacctaactcataaaccccattggtgggaacctgcattcctcagtaatgtcggatcagtgtttctcaactcctccccaccctaccccatcacccgcccctaaggagctttgaaaagatcttttcttcctattctagaaccaattccagcttccacacctcccaccttgagaaggaatgcattagatgaaccaagacttctgcctatatacatgggctgctacagttggccaccccggcagtctgcggcctcccaagcgggggcctgggtcttaatccttacttctctctaagctgcatgaagggtgcccccattccatccctcttcacttctccccagcatagcgcctccataaatgtttgtgaactggatgaatgactgttgagcgcttggtatgatgagctgcttacaataggtgctcaaccaatctttgtccaatctatgaatgaatgaatgaacttcacccttttccttccatacctccgggctgagcctctctcccacatggaaaccctaaggctgagaccaccaccttcctaccagttcctgggggtgcccagtgaactgtctcagtatccccagtgcctagcacacagtaggcgctcaataaacgcttgctgtgttcataatgaatgactcaatcaggcccacggtgggggtgaaggggggctccatactgtgcctaaggatacagtgaatgagcaagtgacacacactcccccaccccaatccctaactctccttcctcccaggatcgggggagaaacctcggcccacagccgggatgcgcccccgccggggtcaccgcggcggcgaacgtcccggacttcgcatcccggtgaccccttgggatgaaccgaagccggacccgcaccttggccgtaacaagcgcgctccacgccgccacgcaccagcggtgactcccgagtcctctgtcgccctggcctccccgcaggcgggtttcgaggcccccgcagggagttcagggccacggccacgtgcagccgcccccgagcccgagtttgcaggctcggggtccggttcgcgcttcggtggcgcccggcgaggctgcagcgcgcaaagttcccacctcaagttcccgtcgcggcgtccccgcctcggagttggcccggccgcggcttccgttccccccggctgcccacgggtccggggcgaggacgcgagaggggcctggaagtcgcccggggagcccgctctgcctcccggagccgccgccaaacttcggtcccggggcccggctcagctcccgccctcggagccacggccgccccgtctctgcctcccggtccccgccgggctccgagtgcgccgggagcgcggcgcagcagccgccgagggagggagcgaggcaggaggcgggacggagggaggggactgagcgcggggcggggagaaggggcgggcagccgaaagcgcagcgcctggcctcgcctcgcttcgggacagtggcagcggcgccaccgtcacggggcgtccaggcgcccaatcgggaccccgcaccttggatccgggggccctggcgcgcctgctggattgcgctcctcgcggccagttcctgagcccgcgtccgggactgctcgcgctacgccctccctcccgttgccttcttccccgtctgctctcccaggagcgaccaccctgcggccccttcgcctgcacgcgacagccttcaaggtccccgcgctccgctgccctggagcttcacgcaccaggcggcgcggcagcctcctagggtcgcgcgccctgtcagctttccccgcggtgcaagtgctccggtggtcccgggtccgcgcccctagcagcaccgccccagggtctacatgtgctagatattaaaaccccactctccgctgccccggggccgcgctccacgcgcttacacatcctgggaaccacatgcgccatgtctcctgcctttccctggaagtcctggaagtccaagtgcactgctgcctctgggtccctcgcccccctaccccgggcaaatactgcatccttgaggccctccacgcgctgctgccctggagccgaacgctccaagcaagcttccacatcctgggggccatatatcgcgcgccttttctcgacctcctagaccaatgttgcccttgggcccttcctgccaccgccacccagggactgccagcatcttgctgtgccaaattcctagggccagtacgtaccgtgccaggtgttttcccttccagtcccgcggggccgaggccccagagccctcccgggctagcagagccgcacttcgtcgtccactcccctggccggtgcagggcacttggaccaggtcctggggtcttgctcccagtgtggccgcctagcctcggagttggtaggatgctgcacagatgctggaggttgggttggagggatctattgggttggaggaatctactgagttggagggacctattggtttggagggatctgtgctgctggcagggctggcctcttagggtggcttgccttgcactccgttcctcttctcctttctgtctcttgcactccgttcctcttctcctttctgtctcttgcactccgttcctcttttcctttctgtctctactgcctttgcctatcatcagagaaccaagaaaggacatgaagaaaccctgctgccgaccagcctgaggccttctgcttgagtggggctcgggttggggagtcgtgggtgctcattaagtgggttagggttaaccctaagaaatgagcgcagggcacactagcctgcgcggcagtcccagccgggtggagcataggagttccaggttatagtgcactatgatggcaccactgcaatccagcctgcgtgactgagcgagatccagcctctaaaacaacaagaataaaaacactggcttactggtgaggtggaggcctggacagacaaggatctgcctaaggacctgtttccaagagctcaccttctactgggggcttggcagaattgggaaactgctgaaatacgtgattgcagaatgaagccagagaggccactttagatagaataatgggggagggctcctgtggaggtgatggttacatggagccctgagccagaaggagcccatctggcaagatgggaagagagctttctaggtggacagaacatcaaaggcactggccttcaagcaggagagaaggaggcatgtctgagaaacatcaaagagaccaaccagcagtgtgggggaggggcctgagtggggtggggtgggcttttgttgtcagagggtccctggattacatattgagaaacactcctcttgtggtggatcaggcttctgccttcctttcccatctgaaatttttttttttttttttttttttgagacatagtctctctgtgtctcccaggctggagtgcagtggtgtgatctcagctcactgcaacttccatccccctgggttcaagcgattctcctgcctcagcctcctgagtagctgggactacaggtgtgtgccaccatgcccagctaatttttgtatttttagtagagacggagtctcaccatgttagccaggctagttttgaactcgcaacctcaagtgatccgccagcctcagcctcccaaaatgctggaattacaggcgtgagccactgcacccagccagaaaattgctctctatcttgtttttgagacagggtctgactctgtcacccgctggagtgcagtggtgcaatcatagctcactgtaacctctaactcctgggctctagggatcctcctgcctcagacttctgagtagctgggactaccacacaccaccatgcaccactaatttaaaacaaaatatattttttgcagagacaggcgggtctggaactcctaggcttaagacatccacccaccttggcctcccaaagtgctgggattacagatgtgagccgctgcacctggccatgtttctatcttttttacttgcgtattatctgtgtccccactggggaccaagctccatcagggcaaggactgtgtgctgtctctcccctctccagcagctcccactctgctaggcacatacagagcaggcttcttaaatgattcctggaaatgattcctgggggaattcaggacagttttctggaatagatgtgactgcgtcagagagtcagactcctcactgatgctcacagggtaaggatgcagagcagggcctctcagactttactgtgcatctgaatccccctgagggcttattaaaacccagacggctggcccccaccctggagtggctgattcagtgggtctggcgtagggtccttctgaggagttccctgctgatgctcatgcatcaggtctggggatcccactttgagaaccactgatattgaagacttgaacgcctacccagctgggtctgacttcggagccctcatgaggtcccgggacaaactcaagccagcttcttcttatgtaggatccataggaactaatggccacctctagagatggggctgggcttattagaacactatgcacctgagtcaaatttcatagtgacctgcagacagaagacctggtacactgtgtggagaccgtcagtgagaacaatgacttccacccggtcctgcctacccgcaacatacacactcacttgctgtacccaggagttaaattactgcctgatcttatccctgactgtgctaaacaatgtccaataaaatccttttaagtccttttaaggaattccctctttgcagttcctccctcccttagagccttccagatttttcactcttctcctcatatcttcattttcctcttgaaaagcatccttccccaagctgttgtgtggaaagagatgttgatgatacccatggaagcttcctgagaaaatgggaaccgtcagtgcttgctgggcagctacgaggtgccaggtggttgctgggtgatttgaagacatcagagccacaactgggcccggaggtggactctggcacgcagacctgttttatttgtccctactgagttaaaatttttaaaaattaatttaaaattagttgctgacctttaaaaactgggagatttcatgtaaaattttttcttttgaaacactgggagatctggccaacatcctttacccacacagcatgctggcgctgggcagtggcttctgctccctgcggtgtgcccctctacccacatcataccatctcggttactgccaggcccctggaagcaagagttggtgacttttcatgttggcagattgtctagggttgcgcggtaaatggcagagccagatccgaacccaggcctgcctaacccaaaagcccaagcttgtcactgaaataaaaactgctgttaatttttcgggcaggaggagaatgtgacattgctggccctgaggaaataccttaaaagggagttactgtcagcagtttaagaatatgccttccttcccatccataaccagctgtcagtaagccataaagttctgggctgtttttccagggcaggaaaagttatccagagctgtccatttttttttaacccatctcctccttgagatgaaaaggcttggatttggttggagttgggaggaatctgttgagagtggtgggtggggtgggattttcttggtttggagttagctctttggacaggggatcccactgggtgtctgtggggtgaaggctggtgtttgagtcaaggcagggattgggatgggggcattctccttctctctctccacagacactctgccccaggcactttccctttctgttcctctgattccccaaatcctgtcaccttcccgcagatttccatatagccacttcctgcaggtctcagcccattgtcaccttgggattcctggtctgggatggggttaggttgcagtaggtgaggttgaggcatgcaagggtgtgactttattgaagtctttcttttaaaatgtgatattttgcttcttgtggatttttgtggactaattttgatttttaaaaaatattgtttcaaaatgttatttaccttgatgattgagcttttgggcacctccttactttttttttcttttctttttttattttttttgagatggagtttctttcttgttgcccaggctgaggtgcagtggcacgatcttggctcactgcaacctctgcctcccgggttcaagcgattctcttgcttcagcctcctgagtagctgggattactggcaccctgccacctcacctggctaatttttctatttttagtagagatgagatttgaccatgttggccaggctggtcttgaactcctgacctcaggtgatctgccctcctcagcctcccaaagtgctgggattacaggtgtgagccaccacatccggctccctcttacattttgtaccctgcctgcctcatcccagctcctgccctgctcctagtccagggttctttggcaagagccctgggctgagagtcaggggacctgggttctggtccagcttgtgtcactagactagctgtgtggttggacacaatctccctgcatcctgagcctcagctgtaccatctattcagggaaaaggttatatctaactctattccagaatgatctaagacatctgctagaactctgaccggtggtgcattgtgtctatctcctgggggctttggagccatttgagccttgctgaccctggccattatggggtgtcactcactgtttatttcttggctctacactcgaggtgttcctctgtgcaaacacaaaatctttgcagcagctgtatgcaatgagcctcagtgccttcatgcctttttcctgtcctggaggaaatttctgttttggaaatgtggttctgtaccttattctttgatgtcccgcttttttgttttttggtttcattccccagatcattggataaacattgtttaaggaccttctatatgccaagcactgagcaagcacttgggatgcaaaagacacgttttcagccctggaggagctcaccttccactgcaggagactgcccatgagcagatccggggaccgggagaagcctgcagcagtggaggacttccagggaggatgaggacacttcgagggaactgtgcactgtcttttctcctgggaggaagcctgcatcctctgtgctgtctccagatgccatcagccccgagcagtgtatagcaccttcctaatagaatcctcctcaagagagtgctgcagtgttacattttggatccacactcgaagggacgaagcttgaagttaaagcttccagttgtctctaaccccatctccctccatccctcctctgggttgtggtttgtccctcagtttttccgcctcctgataactttcacagcccatttccaagtccacctcctgcgttcagctttcctccactgctccagccctcaggggactcttccccctaccctcatcctaagcctttatcaactaataggtactctccctggcacttaattaagatctgtctagagttccttggtgcttcagcccagccacgagattctggttcttgcagggagagggcactgcctgatagttggtaatagctggagggctcattcccctctactcagagggtgcaaactcatgtatcttcccaggacttccatgttttaaaaataatgaagtatgtgccaatatttgaaaattaggagattttcgcatacgaatccagatttctggcttcccttgaaaacttagaagatgtgccaattctgaacctgctttcctgcctggcaaaaattggctagagctggtagcaacattttcctttagctggggcctgggttctccagtttgtcacactcctcaccactccttaaagtctagaaccctttacctgtctacctgtctggtccctgtaggcatctgagattttaagtcctggttcaacttttctctttcttaagaagagagacagctcatcagagcactgcacactggcagatgcttaggtagctcaaagggagggtgggcgtggaaaaggggatgtgtgagcacccaagactgttgagtggttgggggttggagagagtcaggcaggagggtgcttactatgaatccagtccatagatacttagtatcaatgaactcagatgggtgtttgaacctggctgatgtgatgtgggttatgtgtacaggtagagctatatttcatgtgaatacaaaacaacacagttataaaaaccaaaatgaatctgacttcttgagagaatgtgccatgtgccagatactattctaaagtttttatatttcattctcataacaaccccacatagtgggtaacatgattttccctgtttctgggatggggtaaatgagacacgggtgaataacttgctcaggattacacagccagaacatgagaagctgtgatggcaacacacacagaaagaccctgaagctggattttacagcaggatccgaggtgctggtagatgctggatttcgttattgttgtcatctttcctcccccagattagagagctattgctgtgttgtcccatctcttgggattgtaatttgtctccctcctgctaggagtctgtcaggcttgaggctttcttccttagcagggggttgaagctagccagcccctcaggtgtattactgtaggctgtttgatctggacacatgcagaagtatatggctttcgcaagaggagggaagggtgggggtggggaagagaagaaagcagtggtcctgccagccaggtccaggtcccctcagacagaccctggatcccagaagcacagggcccaccagccaggtcccccaggatgagctcattccccatgtccccggatctgaggtcagcgtcccattgcaccattctagcgtccgtcttgctgcagtggaagatttttcgtccccttcccgttactttgcattgcttctgggctgcgttccctcttatttcattttcatctgaaatcctgagctcaccctccctagcagctgacgggaccatttatttccgaggctgcagccagtcgcagggctgtcgacagctgagtggaatgctctgggattttgccaccctgtttcgttcctgcagacgggaaggaagacaggagaacatcttcattttgtagcagcaaaggctgtcagagccttggagcctcagctgtcatcccctttggcctgagatgcaatttgttttgtccagaacactgcctgggtggacttggtccctcggtcatttgtccttttggtctcaaaaccttgagagagcgtggtctgtgctttgcaattgtcctgtcaaatgcccctggatcttcatagctggaacagctcctagaggtcgttttgtcagaggttctctgtgttcagagagggtgaagaacttgtgggggttgcatagcaagtgactggaagaggcaggactgacaggttcctgggtcctaggcccatcccttttgcgttatattaggttgcctctttagaatctcagaaggccaagcctcagggaaacctccctatgccccaacttcctggaatgctcttcctctagcccttttcagggttcctcctttccctcctttggggatcagctcaagtgttgcttcctcagagaacacgtggaaaagtgcactcatttcccttggataaattcttaggagtgaactcattgggtgaaaatcacatgtccgctgggcacagtggctcacacttgcaatccccacagtcactcatgcctgtaatcccaacagtggctcacgcctgtaatcccaacagtggttcacgcctgtaatcccaacagtggttcaaggctgcaatcccaacagtcactcacccctgtaatcccaacagtggctcacgcctgtaatcccaacagtcactcacacctgtaatcccaacagtggttcacacctgcaatcccaacagtcactcacgcctgtaatcccaacagtggttcatgcctgcaatccccacagtcactcacgcctgtaatcccaacagtggctcacgcctgtaatcccaacagtcactcacacctgtaatcccaacagtggttcacgcctgcaatcccaacagtggctcactcctgtagtcccaacagtggttcacacctgcaatccccacagtcgctcatgcctgtaatcccaacagtggttcatgcctgcgatcccaacagtcactcatgcctgtaatcccaacagtggctcacgcctgtaatcccaacagtcactcacacctgtaatcccaacagtggttcacacctgcaatccccacagtcactcatgcctgtaatcccaacagtggctcacacctgcaatcccaacagtggctcactcctgtaatcccaacagtggttcacgcctgcaatcccaacagtcgctcacacctgtaatcccaacagtggttcacgcctgcaatcccaacagtcattcacacctgtaattccaacggtggctcatgcctgtaatcccaacagtggctcatgcctgcaatcccaacagtggttcatgcctgcagtcccaacagtcactcacacctataaccccaacagtggctcccacctgtaatcccaacagtgattcacgcctgcaatcccaacagtcactcacacctgtaatcccaacagtggctcatgcctgtaatcccaacagtggctcactcctgtaatcccaacagtagttcatgcctgcaatcccaacagtcacactcacacctgtaatcccaacactggctcatgcttgtaatcccaacagtggctcaagcctgtaatatcaacagtggttcatgcctgcaatcccaacagtcactcacacctataatcccaacagtggctcacgcctgtaatcccaacagtggctcacgcctgtaatcccaacagtggttcacgcttgcaatcccaatagtcactcacgcctgtattcccaacagtggctcatgcctgtaatcccaatagtggttcacgcctgcaatcccaacactcactcatgcctgtaatccccaaggcaggaggattgtttgagctcaggagtttgagaccagcctgggcaatatagtgagacctggtttctattaaaaaataaaaaaaaattagccaggcatagtagtgcacacctgtagtcccagttactcaggaggctgaggcaggaagatgacttgagcctgggagtttgaggctgcagtgagccataattgtgccactgcactccagcctgggtgacagagtgagaccctgtctccaaaaaaaagaaaaaaagaaaatttatatgtcttcaatcacagtgttatgctacctgcttgtactggggtcttctgtctgtaaattatgtgaggacaaagcccattattatttgtagcactgtgtttcactgctgtcctgttctcagcaaggatgaatgtgaattgaatgaatggatgagtgtacgaacgagtctcttttggattgatagctgttgggagataattttccatgggagtcttgtgtttctgcatgtcttgcaagcaaacatcctgactgcctttgttccagattacattttagagaatgttcacatagtaaactgccttgaaagatagagatggtgtctttcttcagagcaaagagcaggtatgtttactatctgttataaaagatttgggtttcttaatatgattcagccttaaaaagaaaggaaattttggcacacactaccacatggatgaaaattgaggtcattatggtaagtgacatgagccagacacaaaaagacaaatactatatgattccacttacatgagtacctagagttttcaaattcatagacgcagaaagtataatagtagttgccaggggttcagggaggggaaaatggggagttgttcagtagatacagagtttctgttatgcaagatgaaaatattctggagatctgctacacaacaaggtgaatacttaagactactgaactgtccacttagaaatggttgaggtggtaattttatgttgtgtgtgtgtgtgtgtgtgtgtgtgtgtgtgtgtgtgtgtttgccacagacacaaatgctgttttgggtttcctgagcttatggttcctctcctataatgcagctctccacatggctttgcactgccctgtgggaattgggacttgaggaagtgatgcaagtagcagtaatctggctactgctgttgctgtgagtcatcaactgtcctttgtctttgacccaggagtcttgcatcttctgccagcatccacaaaacttgctaacttgcaagtagtgtaaatctcagactcttcgcagtagacaatcgtgatttctgtacattttccttggagcacttttgacaactgtaggtaaacacttgtctttaagtaactttaaatgcttgtctgcttcatgaaaccctaagcttttttttttttttttttgagacagagtctcactctgtcgcccaggctggagtgcagtggagcgatctcagctcactgcaacctccacctccctggttcaagcaattctccctgcctcagcctcctgaatagctgggattacgggcacccactgccatgcccagctaatttttgtatttttagtagagatgggatttcaccatgttggccaggattgtcttgaactgctggcctcaggtgatctacctgcctcggcctcctaaagtgctgggattacaggcatgagccaccacgcctggccaaccctgagctttcttgtttgcagttttattcccagtgcctggcacacagaaaatgctcaataaatctttgtagaatgaatgactgggtagatggatggatggatgaatgactgcttgttgtcttgatcccaccattgcttcctcaagaagagaacttctggaacagatggtctggcttgccgtcacagctatttggaagcaagctcccgaggagtcatctctcttttgtgccaggctggctctagtcttcctcaccaccccctcccccatgcttctcctacacaaatgctgctgagagcacttcaagggggaggaaagtcccacttctctccatctgccagctgtttgcttgtgatgatcaagggtcactctggtcatcttacagaagaggacatggaggcttatagaggtcaaggcttcacaaaacaggcctgggtttggccactcgctgtctggtctcagatgggtccaggttctggggcttctgccccatacactaccagcagccctctgcacaccaggagatggaacttagaaggatctcaggctgttgacaagagggttggcccacagtggtttggttcagtgagcactcactccagtcctggttttaggtgggcactgtcccactgggtgatccttgaagacctctgagcagctgcctatagaaggcccctgtctggctctgaagagctcagggggatacttaattggcagtgggtggtctgcagggcttggcttaagccctaagcttttttgtttttttggtttgagacagagtctcactctgtcgcccaggctagagtgtagtggagcgatctcggctcactgcaacctctgcctctggcttctggggctctctggatgctgactcagatcccattcactttgtcccttcaagtccggtcccctcctagctgagtctcccccagcgccctgggaatgggggtctctggcaatttctatgttctcttttcatatcctcattatggtgtaaactttatgccttgctccccttggggctgtccctgtttgttttcaagagctgccttttgaagcgagaaaaagataaaaaaagaacctaatcaatttctcctttcatttctgctgaaacgattttaattcttttttacacagtgtagatccctctgacttaccaggaaagagtgacacgggaaggctagggagagaagacaacgaaagcataaagcctcacatttcaagacagctcattgtggcatttagaaatggggatgtggggagcagaatttggactcccaggctaatgcttttctgagcatgtcaagttatatccctagtccgcccagtgaatatttattcagcacctattgtgtgccaaatgctttcttgactcatgaaccctgactgcttaaaagatatgctttactcttattggtaatgctggtagctcttcttgcgtttcctttcatgtggattgtaataaataatcttttggagaaaaatatagttatcagcaatagtagtcatttgtacactcgttgatctactcatgtattcatctttaaacaaacattaactgaacacctactatgtgccacgctttctagttggggcttgggatcttggggctatgactttgaccatgacaagtaaagtctctgctttcatatgccataagtatttgtgtgtgagagaggcaataaacaagagaacaagtgtgcatgtaatgacagacaatgataaataaaggaaaagtgaagtaggtgagggttagagagtgacaggggcagctatttcatgctcatgtgggaaaatgatgtccctggctaaggacactcaactcactcaatggttacttcttgaaggcacagagttgagttacggatcttttctctatgcagcatgcccctcatgttctttttcctctagtcagggatttgctgtgctgagccatcctcgtcctcaccctgttcctttggctcctgccccacttgcattcctgggagtctagtccatccctggggccttccatccacccgtgccctgggctaccctttgctgctgttccaacacaccaggctccctctcagatcagggctttgcatgtgccatttcctctatctggaaagttattccccaagatacctgcatggctctgtcattcacttatttatgggtttttgctcaaatgtttccttcgtggtgagtctttcctggtccccctatttaaaattgcgacaaacccaccactgcgtgtagacatctgcattttccatccccattttctttatctccttggctttttattatcacttgctctactgcatgttttaattagtggccactacctttaggtcagatgggatgagaagatcttcaagggcaggtatctaggggagaacactgtgacacagagctgtcttgagaggactaatgaccttcaggtgaaggccccatgcagcctgatgcaaccccattctccttcctctctctgatcttgctgagcctccacattggccaagcccagtgaagagatgagtcatgtacaagtcagcgtccaagggcacagagaagaatggagaaagggctgtggaggggagggtctccaaacagtattctttggacccctagggatttattaaagagttttgcacagtcttgcaaggatgcactgggctggactttgatcactccaccaacatttccacaaggtacaaggcctgactttgaatttcagctccgctgcttaccagctgtatgactttggacaagtcaccgtgccctctgagcccagatactcatctgttccgtgaagctaaaaatccctgctctgcatccctctccagatggttgtgaagagtcgatgaggttcaggatgtagaagtgctgcgtaaacagctgagtcttggacaaaattggtttttttaatcagctgccagctcccatttccattgttgatttagaaattccaagtctagatgcaaaataggttactggtcgccatgaggacctgggaatgaaagctgttttcagcccaacccatccacttaaattggtccttgatggaaaaatccataaactcctttaagatcccaggtgtgggtagcagttctgttacccatccatatgtaagacacccagtgtctgctggggggctgtagacaagatcttgattccagcttattaaatgcttcaagtggcgattggttctccttcctcctcccttccttactccagccaaagggagcacctctcctggggcgagggaggacagatgggtgggtggtgggcagggccgaatgcttcctgagaagctgtaggaagagtgtgggggaaactgcaggccctcttttctttgttgggagctcataagccgttctatagcaggtacgcgataccccgcagccggagccccgtggtcccagctccaaggagagcagagaacactgcctgtggttgccaaggcatgtagctgcagcgggcatgtctctttagcaatctgggccactagcccagtgtgaagttggcaggtgggcacaacgctggctaattgctgtgatttggcactcatatgcggagtacagcgcattgtaccaagctcaggggttagaggcagttctcagccagccgcctttgcctgctgtcactctctggctttgataccaagtcaagaatcctgtttgttattgggggtggggaaagaggccctctttttctccactgggcagtgttgaatccatcctcatttctggcctggggggtcccgcggtcagcagccagcactccagcctgggcaaaggaggcctgagtcttcgtctcagctcccacaatcccctgttccatatctttggacaagttctttccttgtctctaccttggcatatgcattagtaaaatgagtcttgtgctgccatacttgaggcttctttcaattcaaataccttatgtttttaggacagggttttctcaaccttggtactttgaacatttgagggagaataattctcttgaggggctgtcctgtgcattgcagggggcttagtagcatccctggcctctacctattagatgtctatggcactcacctcacaagtagtgacaaacaaaaatgactccaataaaaaataagactgggtgcggtggctcacgcctgtaatcccagcacactgggaggctaaggtgagaggactgcttgaagccaggagttcgagaccagcctaggcaacatagagaggccttatatctataaaaaataaaaaaaaattagccgggagtggtggcgtgcacctgtagtcccagctactcgggaggctgaggtgggaggatcacttaagcccaggaggttgaggctgtagtgagccgagatcgtgttactgcactccagcctggtgtcagtgagaccttgtctcaaaaaaaaaaaaaaaaaaaaagtgaaaaagagaattccctgggggagcaaaattgcctctggttaggaactattgttctagggtataggctgaacattttgcaggctatgggaaacatttcctttgaatattactctggagtgtaaattaccgcctttattgtcatggtccttagttatttgacacacgtattgatcatctactatgtgccagaccctgggaatatacaattaaacaagacagacatgtccctgcccacgcaaagctctaagtctagagggtgcagggggagagggggacaatattcatgtaaccacagaaaggaataagataatttcacatatcacctttaaaaagacaacatgatagagttacttcacggtggctaattaattttcctatttaacaattttgaaagttcatgcaggctgggcatggtggctcacgcctgtaatcccagcactttgggaggccgaggcaggcggatcacgaggtcaggagatcgagaccatcctggctaacacggtgaaaccctgtctctactaaaaatacaaaaaacaaaattagctgggcgtggtggcaggtgcctgtggtcccagctactccggaggctgaggcaggaggatggcacgaacccgggaggtggagcttacagtgagccgagatggagccactgcactccagcctgggcaacagagcaagactctgtctcaaaaaaaaaaaaaagaaagaaagaaagttcatgcaggctgggcatggtggctcatgcctgtaatcccagcattttgggaggtcaaggcaggagggttccttgagtccaggagttcgaaaccagcctgggcaacatagtgagaccctgtctatatctttaaaaataaaaataaaagtaaaaataaagaaagttaacacaccaactattaagtaatgtacccagagcatattaaggattaagtaaagtatctagagatatgactagaatgatttttcctttggcctcagaatagatgccatgcaggaaaaaatcttttgaattcctaaacttgttggatttattcagtaacagataatcttgttagaaggctgtattagtttcttgtggccacagtaaaaaaagcaccacaaattgggtggcataaaataatagatatacagggctgggcacggtggctcatgcttgtaatcccagcactttgggaagtggaagcaggcagatcacaaggtcaggagttccagaccagcctggccgacacaatgaaatcctgtctctactaaaaaatagaaaaagtagccaggcgtagtggcatgtgcctataacaccagctacttgggaggctgaggcaggagaatcgcttgaacccgggaggcggaggttgcagtgaaccgagattacaccactgcactgcagcctgggtgacagagctagactccgtctcaaaaaacaaaaacaaaaaagcgatagacataccttctctcatagacctgggggtcagaggttcaaaaatgaggggtcagcaggctgtgctccctcccgggtctctagcggagaatcctgcctcgctttttccagctcctgggggctcctgggactccttggcttgcgttagcaccgttcccatctctgcgtccttcttcacatggcctccgctctgtgtctgtatctctgtccaaatctccctcccctttctctcacaaagacactagagttagggcccaccctaatccttctcttaccttggttaaatctgcaaagaccttgtttccaataaggtcacattcaaaggcactgaaatctatctctttgggggaactctgttcaatccagtacacaggccaggtctgatgaactagtcccggccaggggaagtgaggtcaagtccttctgctttcatgagtctttgaaataagtaagcccagcttctgatgtaacaaccccagggcagggatgcctgtaccaagcgggcccatcttcaacgctagttccacacccacagccatgcccctgcgtgcaccaactctcttgcccccttctcctttttctgaattcttccagcaaaacccaaaccttgatgaaatccagctgtttatagctgtgcctaagctgaacagtgtctgtagaacacacaaccgtgccgacgggtctgtttttaaatttgggcccgcacaattcaagtggatcctcagcgctgccgacagtccccctccacttcctccttcccccaattttccttccacccagggattgctatcttgcattttctcctctttcgtcgatcttcaatacactctctccctccttactctcagctgatgacttgctccttatttcgctgagaaaataggagcagtcagaagagaagtccctgcccttcctcagcagacctgcatctgtgccacagactccacttttcctccctcctccacctaagtccaacttccctgtgcactggcctgcatcccttctccttggggactttattcctgcatttgtctcttctccacttcctgtattgtgtattttcccccttcaacattaaaaggaaaacctctgccagcatccctttcccctctaaccaccgtactggttctgtgcttctcctgactgcaccgtctcttgagttgcacacatctgtgtttccggttccttcgcagctgtctttagtgaaccacaccactgaatctgcccaagacaatcatcacaatctccatcttgttaaatccagccgtccatcctcactcatccatgtacccaaactctcggcagcatttgagaccatcgatcatgtcactggagtgcattcttcttgattctggggatgacagatactcctggctttccacctacctccctgcccactcctcagccatcattgctggcccctcctcttcctcctgacttctgaatgttggactaaaccagagttcagtctttggccctctcctctcccctgtccacatagagcctgtgctgatcatattcagtcccaagtcttagaaataccatctatatttgggtgaatcctaaatttacacctatgacatcaattctcctttgtactatgtagtacactctgtactaactacctattcaagaactccatgcagatatcacaaagtgccactgactccccacgccctccccagaccacacttgcctcaccttcctcacctctttctcaccctaatattttcagcctgaaattgtaggactcatccttcaattctcctgtgccctctgccctgttccatccagtccatcagccagtcattggggcacccttcagaataaatcctgaatccgacttctcaccacgccaccgctctctctccctgatccaggcaccatcatgtcctgcctggaggaatgtagcagcctttcacctgggctccctgctgtcactcttgtctcttacaagtcgttctcctccctgcagctggaagggatcttttgaaagcctgagtcagaccgtgtcatctgcctgcttaaaatcattcagtggagctgggtgctcatgcctgtaatcccagctactcatcctgccgtggagcatttcctgatctcacctgagctctttgggaattgcttgagcccaggagtttgagaccagcctgagcaacatagcaagaccctgtctctataaaaacatttaaaaattagccgagcgtagtggcacattcctgtagtcccagctactcaggaggctgagatgggaggataagcccaggggggtcaaggctgcagcgagctatgatcacaccactgcactcctgcttgagcaacagagaccttccttctctccaaaaaaaaaaaaaaaaaaaaaaaaaaagaaggaaactgaggcacagaggataggtaatggcttaaagccatggaactatggagtggcagaggcagaaaatgagcccaggcaaattgcctcccaagccagatgctcacctgccttgctgtctgctggtgactctggagaccgcgtccctgatttcacctggaggccagtgaatgggaccttgcctctcaaaggacattgccccttgtggtgagtggtggtcaggaccagctgtgtagtttgcagggcccagtgcaaaatgaaaatgtggggccccttgttcaaaaaatattaagaatttcaaggtgggaacagcagagcatttgagcaagcacagggccgttctgagcccggggatccgtgtgatgcacaggctgcctgcccctgaagctggccctggtggtctggactgggctccgcctctcagcagactcagggctggctggtgccctgggcttgctcctgggcttcctctgaatgctttgccagcctcctaactcctctgaagacccaaggcaaaccctgagatctgctaagaggccccgaaaatgaagctggaaattttcctggctgcactcatctccacaaagaacataactggatacatctggaataattccatgtggctcaggctggcccggaaccccaaccagccgaggcaagatcaaggaaatgctccataaaccaggatcctcatgttccttttctagtattacgacgtaataaataataataacaggccaggcacagtggctcacacctataatcctagcactttgagaggtcgaggtgggcagatcacctgaggtcaggagttcaagaccagctgaccaacatggtgaaacccaatgtctactaaaaatacaaaattagccaggtgtggtggtggcatacgcctgtaatcccagctacttgggaggctgaggcaggagaatcacttgaacccaggaggtggaggttgcagtgagccaagattgcatcattgcactccagcctgggcaacaagagtgaaactccatctcaaaaaaaaaaaaatgacattaattatatgtcatatataataataatgcatttcagccatcatatactgtacttttggcatttatatttatagtcatgtgctgcctagggatgtttctgtcagtgatggaccacatatacaatggtggtcccgtaagattataatagagctgaaaaattcctatcacccagtgacatcgtagctgttctaatgtcacagcacaaaaacttcatataaatttaaagtagcctaaatgtgcagcatttatgaagtctacagcagagtacagtcatgtcctaggccttcacattcactcaccactcactcattgactcatccagagcaacttccagttctgcaaactccattcatggttaagtgtcccacacagatcaactttttttttttgagatggagtctcgctccatcatgcaggctggagtgcagcggcaccatctcagctcattgcaacctctgcctcccaggttcaatcaattctcctgcctcagcctcctgagcagctgggactacaggcgcctgccatcacacccagctaatttttgtatttttagtaaagactgggtttcatcatgttggccagctggtctcgaactcctgacctcgtgatccacctgccttggcctccctaagtgctgggattagattacaggcatgagccactgtgcccagcccagattaacaattttaaaaatcttttatatcatatttttactgtaatttgtatttatagacacaaatacttaccattgtgctacaattgcctatggtattcagtacagtaacatgctgtacaggtttgtagcctaggagcattgagctataccatatagcctaggtgtgtagtacgctatgccatccaggtttgtgaaagtacactatgatgttcacacaacgataaaattgcctaatgacgcatttctcaaaatgtatcccctttgttaagcgacatatgattgtacttaacttttgcatgttgtgcatttcctgaaaataaatgctcctgaactaacctgtttgtatccaaagttataaactgttttctcctctttcttcttttttttttccctcctgttttagacagggtcttgctctgtcacccaggctgaagtgcagtggcacgatcacagttcactgtagcctcaaactcctggggtcaagtaattctcccgccccagcctccccagtagctgggactatgggtgtgcatcaccatgcctggctaatttttgtagagacagggttttgccaagttgcccaggctggtcttgaactcctaggctcaagtgagcctctcacctcagcctcccagagtgctgggcatacaggtatgagccactgcgcctggcctccttcttgttctggaaaactcttactgctgtagtttcctgcaaaattcagctcaagattttaatgcttctgaaatcattgacaaaaaggaagaactcaacccactccccccatccaatacccacatgcaacattaattacttacattattataaatgtcatgctgcaatgggatgggcccagcccaaacttgtcctcacacagttctgtgtccagccatactgcttgaacccagattcataatttgggtcctggacactggtccttgtaatccaagtgagcagagctgcttgggccaatctgacaggcaggcaggggaaccatgccctgatgtgaccagccttgtgcatgggacatctgtggttgtcaaagactgtaaacagcctggctgggaaacatccagccatcaagtggtatattgcggtgtccctgcaattggcttagtgaatgttcatctcacattgacttctcaggggtctctgtagcaggtataaatcttcgtctgtataagttagcgtgttagtatgttctcatgctgctaataaagacgtacccgagactgggtaatttataaaggaaagaggtttaatgaactcacagttccacgtggctagggaggcctcaaaattgtggcagaaggaagagcaaagggacttctcacatggcagtgggcaagacagcttgtgcaggggaactcccatttataaaaccatcagatctcgtgagacttatttacgaccacgagaacagtatggggcaaacaacccccattattcaatgatctccacctggccccgcccttgacacatggggattattacaattcaaggtgagatttgggtggggacacagctaaaccatatcagttgggcactccaggaaaaagaaggagcacacttctttactttcttccatttcacaatggtggccagttcaacctcagtcattaacaaggctctctatcttcctccacaactgccaggggtgtgccagggtcccagcaataccaaagcactaggaaagccctggcttctgttccatgttcagggtacaggatattctctgaggctgggcatcccacagcatcacccaaggccagttgtcctcaactgggggcgattttgtcccccaggacatttttccggagatatttttggttgtcacaactagaggtgctcctgacacctagtgggtggaggtcagagatgctgctcaacatcctgtaatgcataggacagcccccaataaaacaaagaattatcctgctccaaatgtcaagagtgccaaggctgggaagccctgcccttaacaattcccaagcctctattttcctagccttttgactcctggacgctttatagtctgggaacctctctcttcacgttttcctgtatgtaatgtcctctttccattcttgtgatgaaggatgaggcacccttcaaaggagctggtctttcaccagcctcagagatgaaaggtacctggtctaagccaatcatgccacacccttgtgctagacactggctgtgccagcttcctttgcagctaggagttgccacgtgatgcagcgagtgagatgtcaggggaaatgtttcagggccttctaggaaagagactgttccctggctgaggtgttctggagaggagagctggctggtgtcaagtcctatagccttcttaccggaggcacttatgtgaggatgtggtgtgtggggttgtggcagccaccttgagaccaagaggtaaatcagaagaattgcagctgtagacatgcctgacctcgatgagccactgaatgtaaccatcacttccaggcctctcattaaataaataagccacacatgtctttagaccattacttaatacacctaggcaggtgacttaatctctctttgtcttacgcttgcataaagttgtggacatttaatgatatgatatatgaagaacatttgaccaagagcctggcatataagaaatattcaatgatgtatcgtagatgcttttgcactgtccctatgaactgaattaattaggaataataatgtgggtcttatggtaagtttcttctactgattgattattcactcaattattcaacaaatatgtattagagcctgccatactaagatactggaaatgagagggaattattttaaaagaataaaattagagggaaacaataccctctaattttaacaggaagttgtctattaggtcccaaaaaatttttcttctatttacgagaagtattttgcaaattttagttgtctacatctgtctttatatttatggtagttatttaccaagtccaagccattgtacagtactgttttacagtgagcaggcctatgcaaacctatctcaaagtctgaagaagctgggaggccgaagaaagagggtgacaaatccagttacttagaaagaaacatttaataaggaccagaagccatgctggtgtgctgggcagcagcgaaacaagatggtgggtccccacaccattactccccagacccagggcttcttatgccacagaggaggggtggttcagaaggaatgtgtgggatagttgaagtaagataacatcgaggttgtctgacttaagggcaggatttatggtaagtacctgctcttatacaaggaacaataaatcaactggaaatcttagaggacttctcagaactggagttcatcagaagccaacatggtggattagcttccaagatggtgctacttttgtcctacaaatacctgtagtattcttgttgttgttgttgttgttgttgttgttctgagatgtagttttgctcttgtcgcccaggctggagtgcaatggcacaatctcggctcactgcaacctccacctcctgggatcaagtgattctcctgactaagcctcccaaatagctgggactgtaggcgtgggccaccaggcctggctaatctttgtatttttagtagagatggggttttaccatgttggccagggtggtcttgaactcctgacctcaggtgatccacctgcctcgacctcccaaagtgctaggattacaggcgtgagccactgcgcccggcccacctgtactattcttgacttagtttttctttaaaccaacttacttttttggttaatagatttactttaaaaagaaagttggtatcattatggtaaacagaaaagcagtatcacttggcataaataaaaatagccaaaacataaatgcaatcaaagacttgaatgtcattagattaaaacaaaatattcattgtgtacaatctaaaatcatcttgcacatcacaggttgtatctatactgcacttacagaaactctaaagagaataataatacttagtaaaaaaatttaaagttggaaaacctgctaagattcataaatgctgcaatgggtctaaagagagagaagtttgacataaataatgtgtaaattatacccaattattcctcgacatttcatcatatttagaggaaaattactatgaaatatagtgtgggtttctggttaacaatatttttcccctcaagtttatgaaacatttccctatcataatccccaagatatttcactgtgagcataggaatccaataatgcctttcaacagtgatttactctgcaattggcattcatatttacttaacttttgtaggttgtggacttactgaaaaataaatgtgactgaaacagcctgtttatgtccaaagttataaactgtttctggagtgcagtggcgtaatctctgctcactgcaacctccacctcctgggctcaagtgattctcgtgcctcagcctcctgagtagctgggactacaggtgtgtgtcaccacacctggctaatttttgttttttagtagaggtgaggttttgccatgttggtcaggctggtcttgaactcctgactcaggtgttctgcctgcctctgcctcccaaagtgttgggattacaggcgtgagccaccacatccagccataaactgttttctttttcttattctggaaaactcttaatggtcactttcttgcaaaaatcactgaagatttcaacacttttaaatcactgacaaaaggttcaccctccttgcttcatatccaacacacagttacaatttcaagaacagatgtataataacttgcccttgaataaatgtaaacctgaattactcagactttgggaagcatatcaagtttgattattttgtgactgtcagttgaagctgtgatgggtaggagtaggttctgaagaaatagacattctcactgacagttgtcctgggaagagaggtgaaatgagttagggggctgaatccaggatgatgctgtttagaaaagggtagtttgatggtaggtaagatttacgagtcaatataaacaatttggaggtggtagtcctcaagaatgtgaggggtcaggcaactatagaatggaagacagcatttgcaaatcatctgataaggggttagtagccagactatataaacaacttctaccattcaacaacaaatgaacaaccaacctggtttaaataatggacaaaggacttgaatagacatttctgcaaagaagatacacaaatggccaacaagcacataaaaagatgctctatgtcacaaatcctaggggaaatgaaagtcaaaaccacaaggagataccaccactatccattaggatggctactattaaaaaaataataataaaaagtgttggtgaggatgtggagaaattggaacccttgtgcaatgttggtggaaatttaaaatggtggaactaccttggtggttcctcaaaaaattacacatagaattatatgacccaacattcccacttctggatatacacccaaaagaaataaaatcaggaatttgaacagatgttaatacactaatgttcatagcagcattattctcaatagtcaaagggtggaagcaactcaaatgtccattgatcgatgaaagaataaacaaaatgtgacatatacatacaatggaatattattcagccttaagaaagaaagaaatcctgacacacgccacaatgtggatgaagcttgaggacattacgctaagtgaaataagcaaaagacaacaaatattgtatgattctacttatataagcacccagagtagtcaaaattcatagatacagaaagtagaaaggtggttgccaggggttgggtggagggaggtatggggagttgtttaatggctatagagttccagttttgcaagatgaaaaggattttagacatagatggtggtgacaacgtgactatgcttagcagtagtgaactgtacacttacaaatgggtcagatggtaaatgttatgttatatgtatttatcacaagggaaaagaaaagaatatggaaagggtcccctgggaaattactgaactccctcctaatatgggcagctgatggcttagggccactgcacttcaaatattgaagaaaatatgacttggctttatggttacagactagaaacgtgttggttaccataaaggaaagagtcttcccagggaagttttgatggaagagctcttgttggacctgtgggggtcagggctggtgcagacatcttcatccagcagtgggccagctgtttctccaatgcctggaggagctaaataattggatttcagaagactttgaagttagaaggctccttcccccatggaatcagtgctggaggcaccgtctcctttggagcgtgaggagggcctccctgttcattgttggctgactttggcacggtggcctggtttagaagatttgcctgggaattgggggttgtttctctctgttactatagcttcccctgaatgtgctgcctggattattgcaattgcttcccagacggtgcctcccaccctgaaccaaatgcattctgcacgatgttgtcagatccttctccttaaattgcaacacagactccgtcgctagtatttccttttgaaaaaaagtctgagctcagttttgtatttgaggttatccacaatatgtttctgaccttctgtccttataccttttgcacctggctgctgattgaacatgtacactgttctctgaacacagccccactttcttattttttgcctttgtccttgtcatttcttcccctgggatactcctctgtcaatcttacaggtccttcaaggttgagcttaatagtcatgtcctacaggaagactcctggactcctcattcttgtcctgtttttgatgaatcttttcacctgctaccctgtgcaattatcattagtggatctctgagagtttctccagctagtctccaagcttcccgggtatagatagcacttgtgatttacttcggcatatcttgtgattacaggggtgattagttggaatgatgatagggaaaaagagcaggaaaggggtctggctaagatacagtagggagctatgggtagctagagaggtcatgcttccactgaacaaaaggggagggaagaagctgccactaggctcagccagttgttgccaggagagaattctgcattgccgcagcccatgtttctccaagagaagcctgagatctggagttttgtgtgagacctctctgaatgggcacctggtctccagtttgatgctgttgacacctggcctgatacctactcaaaaaatccatcattgaatgaacagccgtcgtgctggctagggactgagacaggatgtgaagccatattgttccatcctgtttcctatttgtgttgatttagccccaccttggcctctttttcagagagtgccttagtccagctggattcatcaggcttgttgatacattgagggaagccaggagctttgcagataagaagctggggaaaggcaaggtaaacacaattaagccccattagagggtcttgggggtgaatgaagtgccagtgtgtgaggatgatgaattaggttggagagaaggaactcaagaatatatgtataataacttgcccttgaataaacataaacctgaattactcagactttgggaaacgtatcaactttggattattttgtgactgtcagttgaagccgaggtgggtaggagtaacatttgaagaaatagacgttctcattgtcagttgtcctgggaagagaggtgaaatgagttagggatctgaatccaggatgacactgtttagaaaagggtctccctgctaccccagaggcataagccccacagtcacaattcacttggactccctttgcaagcccggcatttggggacctacattgcctgcctctgttccaagcaagcctcatctcctgaaacatttttaaaattcttccaattatttaggactcaggctaataataacaataatagctaatatttactaagggattatgtgcctggcacagttttaaagcctttatgggtttgaactcatttaacattcccagcagcttgtgagatagctgtgttattattccctttttacagatgaggaaagggattctcctgccttggcctcccaaagcactgggattacaggtgtgagctgctgtgcccagctctctttttaaaaaaccaatgttaatacatgcagacccatatattctttttgttgtggtggtggtggtgaactatacataacataataacatttaccattttgatctttgttttttttcagacttgctctgtcacccaggctggagtgcaatggcgcaatcttggctcactgcaactttttccacacaggttcaagcaattctcctgtctcagcctcccgagtagctggggctacaggcaccagccaccacgcccagctaacttttgcatatttagtagagacgaggtttcaccatgttgcccaggctggtctcaaacttctgacctcaggtgatccgccccactaggcctcccaaagtgctgggattacaggtgtgggccaccgtgcctggcccattttgatcatttttaagtgcgcagttcactggcattaagaacattcacactgttatgcaaccatctcaccatccatatccagagctttttcatctccctaaactgaaacttcgtacccattaatcaacaactttctatcttccctcccctcaggccctggcaaccgtgcttctactttctgtctctgatgttgactactctagaaacctcgtagaagtggaatcgtaccatatttgtctttttgtgactggcttatttcacttagcataatgtcctcagggttcaaccatgtcatagcatgtgttggaattcccttccttttcgaggctgaataatattgcattctaagtattttccacattttgcttatccattcattcattggcaggttgctaccactttttaactattgcgaataatactgctgtgaacatgtgtacaaatatctgagaccctgcttcagaatattttgggtatagacgcaaaagtagggttgctggaacatatagtaactccatgtttagtctgctggggagatgccctattgttttcctcacctcattcattttatattgctgtctgatactgtacagtatttcatttcacttggcttcacttacaaccaatgctgcagtgaccgtctctggacttgtctccatgtgcacacaggtgagtatttctctaaggtaagcactgaccacatcaatggtattgggtcaacaatagtctggattaccatgtttaatttcactttacaaggggtttagtcttcggtgccaagtccaccatctcccacgatctcagtcttccattgcttttggtgcgccccagtgtctctccccagagcaggggggaaccacttcccttcacattcctacttcctacccatcgagaggcaggaacacgaaccccacagctgagctgggctccagctttctttgtctgtcctgagctgtcttgcgagaataacactcaagctccactgttccctccttgagttgtagtatcggcaacctgatgctcattcttccattcaaacagtttgtgcagtttctgccaccagaggcatcaccctcgatagtgtctgcttaatcgatgccacccaaccagttattcttgcctcagttccacctcttccaggatgcctgccctgcttactaccacccattcttttctctttcttttctggacttaataatgacaataataataaataatagttactctttattgagtcctatttgagagatgcacatgtgctcctttttgaatcctcacagaagccctgagaggcacatgctacggtttttcatattttacagcagaagaaacagacacagagaggttgagtaactttccccaggttaccttgctgtcaagtggcagtgctggttccaagctcacgcagtcaggctccgagtgtcctgcgtttgccttgctggccgtctgaaccgttcgctttgtcacaccatcataaaccgcctggcagtgcctgtaactcccagtgaggtcgatacccttttcaagagctgcgctctttcccttcctggtgttctaggcacgcagctggtgcccagcaaatgctcttgacttcttggtctcattactctctgtgaggaaacctgcaggctgttttccaggaacaaaaggtaaataatttcctgtcatcagaagcagtgatggaaaaggggtgttgtaaaggcaatctctctgcttgtgaaaaagaggcaaggagacacagccaaaccaagaggcagaacgagtcctcaatcctcatttctgaaggagagcttgatgaatgttcatgtattgaaaatgttttgatacctgtaaggatcacgtatccaacgatgtggacaatgacacggtccccaacctcaaggaatcacagtggggagactgggagatgaaatgcagctatgagaaagtgtgattctttccaaggtcaagtcatcacagagtgagggtgcttgatgcttgtgtgtgtgtatacatgtgagtgcatgtatgtgagcgtgtgtgtttagatgaatgtgtgcttgcctctgtgtgtctgtacctaaatggttttatcaggagggtcttcctaaagaagctgattgtattatctgttgctgtgtaatgaattactcaaaacttagcgacttaaaacaacacatatttgtcatttcacagtttctgtgggtcaagattccaggcttccttgagtaccctacctcgcccctcaaaagtctgcagtgaaggctgaggtctcatctgaaagcctggctggcagaggaggatccacttccaaactttctcgtggttattgtcaggattcagtttcttgtgggcaccagcttccaacaaaccaagtgagatagagagagcaagatggggtgagcaacatggacccagcgtagttaggtaaccttacttcgaacagacattccatcactttcactatattctatttgttagaagtgagttggtaggttcagctcatactcaaggggtgggacttgcacaaagctgtgaacgctagcagggcaaggaccattgagggacatcctagagctacctgctaccctgattcttcaactgagttagctacctgctaccctgattcttcaactgagtagttcttttttttttttgagtcagagtttagctctgttgcccaggctggagtgcagtggcgtgatcgctgctcactgcaagctccgcctcccgggttcatgctattctcctgccttagcctcctgaccagctgggactacaggcgtccgccaccacacctggctaatatatatatattttttgtatttttactagagatggggtttcaccgtgttagccaggatggtctcgatctcctgacctcgtgatccgcccgcctcggcctcccaaagtgctgggattacaggcgtgagcactgtgcccggcctcaactgagtttttatgcatgaccaggagttcatcagatgagtaaggataataagtggttctgggtggcaagaagccagccagcgggagcccagacatggaagaaaacacgcagcatcaggggaagacagtgtggctatgtgggttgtgcgtgtgtgcatgtttgtggcatgtggtgtgcttgtgtgtgcacacatacgcagttctgcatacatagttagaaagttagaaaatagaaaaaataagaccttgtatttgctaacacagcagtcaataatagtcagtaataaagtaattgtatacaaaaaataactcaaagattataattggattggttgtaacacaaagggtaaatacttgaggggctggatagtccattctccatgatgtgtttctaatgcattgcatgcctgtatcaaaacatctcatgtaccccctaaatatatatgcctactatggacccacaaaaattaaaataaaaaattaaaaaaaagatttcatgagggagagagggtcaattgacaaaacccatctaaaaggcattttagggtgggggtgatcatgaaagaaggttgagaaaaacactgctctagagaagtcagagaaccatttattgaatatttataacatacgggcactgtgttaagcagtgtacgtacgccacctcatgcaattctgcaacaatctttgtattgtctgtgtttgatggagaaggaaatgggtgggcagcttctggcagcttcttctgacatggccctgaatgaccccctctccttgtgtgtgccttatataattccccttgcttgagtgtgggctgggcctggtgacttgctcctaacaaattgaagatggcagaagttatgagatgtcacttctatgataaagtcataaagactgatttcctttataacctgatcatgtaagtgacgctcctctggcacagtctctctggcttttctgctgtggctgctccaacaaagcaagcaggagagacccatgtggcaaggaactgagggcatgtcctgccaatcatcagcaagaaagcgaggcccttagtccgacaggtacccgaagggacccaaatcctgggtcccgaatcctgccaaaaaccacaggagtgagctttgacgtggatccctttcccagttgagccttcagataagaccatgtcccaggctgacagcttgattgcagcctagtgacagaacctgggccaaggactcagggaagccatgcctggattcctgacccacagacatggtaagatagtaactgtgtgttgttttaagcctttaacttttgaggtgattttaaaatgcagtagtcgagaactaatacagaaacagagaggctcagagaggtggagagacttgtctgaggttacatatttaagatttcaagccaggtgtgctgattcccagctcaagtctctttagcaccaccctttgtgcctctagggtcttgatcacagtggccttaaaggcttgatgcaggctgggtgtggtggctcatgcctgtaatcctggcacactgggagactgaggtgagtgaatcacctgacgtcaggagtttgagaccagcctggccaacgtgatgaaaacccatctctactgaaattacaaaaatcagccaggtatagtgtcacatgcctataatcccagctaccccagaggctgaggcatgagaattgcttgaacccaggaggtggaggttgcagtgagccaagattgcaccactgcactccagcctgggcgacagagcgagaccctgtctcaaagaaaaaaaaaatgcttaacacatatgtgtagctccttttgagacagcagtgggaagtcagtgaaggtttacaggcatgatgtgggataagagaaaagcccatgtcttcctgcaccgaacatctaggctgcagccgtgagggccagcctcggggcagggacatcggaatcatgaggctaagaccttggagtgttctgaggacttgaactgaaggtgagaggcagaaaaaaatatacccccttgcttttcttccaccaggatgttttgaagaggaatgcctcttcagggagcgggcaaggagaggagggggctgtgtcagggtgccgactgttttctggtgatagtaacagagacccgaggggaatatctgagcttggatagtcactgcagtggctcagtcacgacacatacccccctctcccccacaggcagcctctctgcggccacccgcggcccccaaatgagagccgcctgggagtctcacgcctttcatttccttgtgacaatagcagaggaaaatagctttctggactcagcccgacactgataattaaaggaacactttatcaccagcaagggtggaaacacccaccaatggccttccagaaaaagaaaaaaaaaattaaaaaaggcttggtcccatcagtctcttctcttcatatggaaatagctggctggtttgtgagtcctagctctgttgatttcttctctgtatttctgcaacggggatgcagaggacacacttctcaggctaagatttttggtttcgtttcatgtttctgcatggacctgcattctaggtcctctccatctctttggcttcctgtggccattgtgttagataagatctaaagtcagttgctgaggggctctgcaaggccctggcgtgatcactagagtgcaagagatgggactttggactcaggcctagatgccagcaatggttctggcattttctagcggtgtgaacctgggtaagttactggacttttctcagcctcagtttcctgacctgtcaaatggtagtgtgcatcaagcaggtggttgtaaagattaaaagagtttttttttttcctgagagaaggtcttgctctgttgcccaggctgcagtacagtgactcaatcacagctcactgcagcctcgaccttctgggctcaagagatcctcccacctcagcctcccaagtagctgggaccacaggtaaaagccaccacacctggctaatttttgtactttttgtagagatggggttttactatgttgcccaggctggtctggaactgctgggctcaagctatcctcttgccttggcctcccaaaatgctaggattacaggttgtgagccaccacgcccagcctggattagaagagatgtctcagataaagcacttgacataggacctggcatacacaaagcactccaaaaaccttagcaaaatactgatgcaagtagagactgtgggggagagtagctgggtaggatgagatagagtaaaccctgtaatccctgaagatcatgcccactaatctcactctgctcaccccaaagcctggacttcctcctaagaacaccagctcttgggccttccccaaaatcagaatgtttttgtcttgtttgttttctatgagggacaataattgatagtaataaggtcattcaagtatgtgtgatattgtccaggaacctatggttggggattaaggaaactagactggtttgtatttctcttgggtggtttgaaatgaaagatccatcttgatgtgggtgtgcgtgtgtgtctgtgtgtgtttctgaatgtgagattttcactttgtttgtccttaaagcgataattctgaccagaggctaacaggtgagatatgatggagagttctgtagtgggaatctggccactgtatgaggctccagggtgttctgtcctgttctctcagggtgtatagccccattccagctcaagcagctgtgttgattccacacctataggctctatgatgttgggcaagtggattcacctgtcttagcctttatttcatcatctgtaaaatgggactaataatcatccccatctcatatgattgttgtgggggttatatctgacggttctcaagagctttggcaaagtggcagctacatagtgggagctcagtaaacagcaatggtactgatggtgggaggataactgtctctttgaggagctcctcaaagtcccctgcaacagggaccccaacacttgggaggtgttgagggtgtgctctcaggatcaatggaatgagagaagcaggatggagcaggggaaggagcagaataaggctgtggtttcagctggtgttgagcttcagacttagcccatggaatgagtgggtggtgggtggggtctgcagtgtaaattgcacagaagtggtttgacccctaggtcattgctcatgggctgcttcctggcgtggaaatggggcctcccttttggaagaaggcaatttattggagaagagggcagtgaagagcctttagaagccaatgcttccacacccacaggacctagggatgggcatctgcctggtgaacaggatctggatggggcatgaacagaactgttacacttctttattcctggaagactgagacatcatggtgtttgctgtttctaggcaaacttttatgggttcctggcctgtgatgggggcagtggcttggcatattgctcacttacctcaggcctcaagtggtatcattaacccagagttgaattttcttcatttctacagccctggcagcatcaggcagcggaaatgagaagatgtctcagccctttgcatagtcctttctgtcctttgccggaaatgaaagcagccagaaacactgcctgcgcagaggccaaagagatgagatcctagcagtcgtgcgagaaatcactgtaaaaagcacattgccatggggacagagaaaaggatatcaccaggcagtccccagggaagtgtggggtcttggaagcccatcagaagacttcccaggggtgtgaacagaatgcggctctgtgctagaggttgagcattttcaattcaggagatttgttataattcggttctgtccttgcagataaagtggatgttagagtttgacggatgcagtctctttggctcgggatgcgatggcaatgagatagaagagtgtctcagggctgggatgggaggagggaccctggaatcagaggagatgcaggcctgagagaagctgtgtcttaggagttaaagacccaatcagggcacacagccagcaatcctcaaatgagaggaagtagcttgaaagcagctgatccttataattggggcatggaggagtggggcacagtggagtcagtgtctggaatggaggctgtgtttaaactcatttttctatctactcacccatcacccatccatccatccatccatccatccatccatccacccacccacccactcatccatccatccatccactcacccacccatccagccattcatctatccacccacccacccacccacccacccatccattccttaccattaatttaaaacattaaaaaataattcatgtggaaaaattcaaatagaagaaaaggataaaaagtaagtcccagatcttagtcactttgtttttctccctagagagaaacagttgttagtttcttttagttccttccagaaatattttgtgaacacacaagcatacctgtgtacacacggtagcaacctataccttctatgctgtgtcttgctctcagcatgccttaaagacacagatggcatttctgtgccagttaaggcaagcttcaggtgtgccatgcatcttccaagaacctgagtgagtgaagataatcacagccacaggctttgaaaagttctgccaagtggcttcatagaaatcaaacatcagtaagatctaattgttcactttctgtctgagtagagacagctggagtttcattcatctgcatcacttggttataaatggttttctttcctgcttttccaatcctgaatataaattaacagtattttccactgatgtggctaagtagtaactagtttttcacaacagaaccattcagaatgtacctgttgttattttaacgaagttcacgcctgttgatgaatgagggccccctttatccacatgcaaaatttcgttttcatgcccgattcatcattttccccaacttttattttgagacatttcaaacctatataaaaggtaaaaccatagtacaataaccgcccttacatccttcctttatactcataatttgttggcatttgacattttttccacattaaaattcaaaaaatttttttctgaagctattggaaatggtttggctttgtgcccccacccaaatctcactttgaattgtaataatccctatgtgtcaaggttgggaccaggtggagataatggaatcatgggggcagtttcccccgtgctgttctcgtgatagtgagtgagttctcaggagatctgatggttttataaggggcttcccccttcgctcagctctcattctctctcctgccatcctgtgaggaggcgttgtccaccacgattgtaagtttcctgaggcctcccccgccatgctgaactgtgagtcatttaaacctcttttctttatgaattactcagtcttgggtatttcttcactgaagtgcgagaagagactaatatactctttgaaagtaggttgcagacccaatgaacttttacctctaaaaacttcatcctgcatctcctaagaacaaggacattctcctacatgaccacagtaccattatcacacccaacaagttaatactgatacagcaattttacctaatataaagtccatattcaaatttccccaactatctcattatcagtctttgaaaatacactttctgccttgatccagtatgaatcaaggatcaccattgaatttagtcgtcatgtctcttagagttctttaatctagaatgttccccacacttccctccccttgccttttttctttccatccctcatgacattgacattcttctggtttgttttctgagacaaggtcttgctctatcgtccaggctggagtgcagtggcatggtcacagctcactgaagcctctacctcttagactcaagtgatcctcctacctcagcctcctgagtagctgggaccacaaggcgcatgctgccactcagctgatttttggatttcttgtagagacatgattgcaccatgttacccaggctggtcttgaactcctgggctcaggtgatcttcccacttcagcctcccaaagtgctgggattacagacgtgagccaccacacctggcaacatggacatttttgaagaactggccatttcttttctggaatgttcaataatttggatttgtctgattacttcttgtgattagatttaggataaacgttttttggcaggtgtaatacacagagaagtttttttctccccatttcatcatgttgggaggcatataatgtcaataatgatccattattggcgatgctacatttgagcactttttaaagaaatctgtgggatttctcaaccacaaaggtacttttttccttttgtaagtaataagtgaggctacgtttctattttgttcccaactgcctttccccagtggttttagcatccactgatgatccttgcctgaataattattgtcttggtggtaacaattttctagttatgtcattcattttacacttattagctggtactgtgcaaagaagcacttcatttacccccctgacgctgccccatccctcctcctcactttaaaatttcttagttttagtatcactggtcttatggactctccccacttccccaagatttggccagtgggagtcccttcgagctggcttctttgaccttgtgacatgcctccatcagttttggggcacttccttacattctggcacaaggtgttgcccagaaatggaatcaattatgtctccttttaaggggtgcatagtatttagaaacccagatctgggtgctgggtaagctttcatgacattggagtgtcattacttttagttcttctggatggagagccagggtatatgtctgtttaaactatgacctcatagtgagaccactatttgtttctgagtaacactgagtttctgttcattttcttttttctttttttttttttttgagacggaatctcgctctgtcacccaggctggagtgcagtggcacgatcttggctcactgcaagctccgcctcctgggttcatgccattctcttgcctcagcctcctgagtagctgggattacaggtgcccgccaccatgcccggctaatttttttttgtattttttagtagagacggggtttcaccgtgttagccaggatggtctcgatctcctgaccttgtgatccacccgcctcggcctcccaaagtgctgggattacaggcgtgagccaccgcgcccagccagagtttctgttcattttctaagaatcatttttttccccttcattcttcagattgggtaattcttgcccatctcccccattccatatttatatcttcattcacccacagtggaaatcctcgttttagtaaaattagtatattgactcatttgttctatcatgcaacacacaagatacttccagaattactgtactgttaccactatcaacaataaatctactaaatcaagtttagcaactatacgtgtgtatatatataaaggtatatatataggtttttttatatgcatatacacacacacacacattccttaccattatcttggtgtgtcctccacctagttctccaccccaaagatctagaagtaagctttagttacttgaatcaattattttccctgtggagtacattatttatatttgctgtactgttagaattatttgtttctgcttgcattcaattctaggaatagcttctttctaccccttttgatataatttacatggttcaaaagcaaaactacataaaaatatgcttggagaagtctccctcccatctttttccctttcaccctattcttatccatacactatagcaaataatttcattagtttctggtgtggaggtaccatatttcattcaatcagtctgtcacggatggacatttagattgcttcctgtcttttgttattatcaatgctgctgcaatgaataatctgtgtatatccttttttcataattgtttagcaattgatatgcaggataatctgctaaaagttggattggtgggtcaaagagtaaatacgtatgtgattttgatagatctggccaaatttccctccttagggattaacccattatgcactcctaccaacaatgtgtgaagagtctttttccccactgcctggtcagcagagttgggtggtaagcttcttttttttttttttttttttttttttgacatggagtctcactctgtccctcaggctggtgtgcaatggcatgatctcggctcactacaacctccgcctcccaggatcaaatgattctcctgcctcagcctcctaagtagctgggactacaggcatgtgccaccacacccggctaatttttttgtatttttagtaaagaaagggtttcagcatgttggtcaggctggtcttgaactcctgacctcaaatgatccgcccgcttcagcttctaaattgctgggattataggcatgagccaccgtgcctggccagtggcaagcttttgaatttgccaatatgataaaggagaaatgatatatcagggtagtttttttttaaacatttgtgttcaggggtacatgtaaaggtttgttacataggtgagctcatgtcacatcacgagggtttgttgtacagattatttcatcaccccagtactaagcctagtacccaatagttattttttctaatcctctccctcctcccaccctccaccctccagtaaaccccagtgtctgctgttttctttttttgtgttcataagttcttaccattcagctcccacttacaagtgagaacaagtggtattggttttctgttcttgtgttagtttgctaaagctaatggcctccagcttcattcatgttcctggaaaagatatgatctcgttcttttttatggctgcatagtattccatggtgtatatgtaccacgttttctttattcaatctgtcattggtgggcatttaggttgcttccacgtctttgctttgtgaatagtgctgcagtgaacattcgtgtgcatgtgtctttatggtagaatgatttatactcctttgagtatatactcagtaatgggattcctgggtcaaatagtagttcatatccaggtagttttaattttcatttcttttcttatgaatgatgttcagcatctttcctatgtttaagtaccatttatcaatttttctaatatgtttttggtcttttcccccctctattttttttttttttttttggagatggagtctcactctgctgtccaggctggagtgcagtggcacaatcttggctcactgcaacctccacctccctggttcaagcaattcccctgcctcagcctcccaagtagctgggattacaggcgcatgccaccatgcccagctaattgtttttgtatttttagtagagacagggtttcaccatgttggctcgactggtctcgaactcctgacctcaggcaatctgcccaccttggcctcccaaagtgctgggattacagacgtgagccactgcgcccagcctctcgcctctatttttgagggttttttataaagtagagagattagcctgtatctatatgtaagtatacatatagatacagatgcatcccgctcactctctttatctatgtgtaatatattattagctagaaaattaattgcaaatactttctcctgttttctacttgtcttctgagtttgcttaactttgttaatgtagtcataatccgtcattttaattcatggttttgtagtttcgaaactctggagtcagttttgagatttctttcttttgcatgcctatagtcaactaattaccaagatctgatgttttctttttcgtaatatttcttgaatgtgaggtttttctttccacagattcatggctaacatcctggccattctgcccacattgctatgagtttcattctcctggttccaggttttttgaccctttgctacccgaatgatcttcttagtcctgttaatattgtcctgcaagtttctgaggttctgttttttctttttttctttttttgagacagggtttctctctgacacctaggctgaagtgcagtggcccgatcttggctcactgcaacctctgcctcccaagctcaagcaatcctcccacctgagcctcctgagtaggtgggagtacaggcatgtgctaccacgcctggataatttttgtattttttgtattttctgttcatttttaacagaacctgagaggctgggtatggtggctcacgcctgtaatccgagaactttgggaggctgaggcgggcagatcgcttcagcccaggagttcaagaccagcctgggtaacgtggtgaaacctcgtctctacaaaaaatacaaaaattagctgggcatggtggtgcacacctgtagtcccagctactcagggggctgaggtgggaggatcacctgagccccggaggtagtgagccatgatcgcaccactgcactccaacctgggtgacagagtgagacccggtctcaaaaaccaaaaaaatccaaaacacattttcttgctcttttcttcagattggataatttacatggacctatctttaaggtgtaacttttccccacgtcatttacattctgctgttaaacttgtcccctaattttaaatttcatatgatgtatttttcagttctagaatttccatttggtttctagttatatttttcttttcctgctgaggtttcctattttgaatattatgtggtagagactttagattcttatttgccaaagagtgcagattttttaagcagataattgagttggttgaacgaaaactgcaaagtctgtctctagtgagacagctaatatctcagttcagctttttttttttttttttaaccttcatttaggctgcttgaaatctgccccatgcagttcaggggttagaccgagatttggacaacgtttatacacagaatcccactccctaccatgccatcttggatctctctcctccaggttttccctcactttgtggttactttgaactttgtccactggttggtcaggctacaaagactatgggttctctatcagaattgtagctgctcatgcagcgctgactgtggcctgacctctggctaaaagccacaaaaattcaggaaactaacctcttgcctttcctttcttccaagtatcagctcttcgttagagcttgcctgcttttgttggctttccagtaccttcatgtagttttgcccctcacccccgagtttatcattgttatctgtgggagggtcagtccaataggagctcactcagcaaagagcagaactccaattaatcttttaaaaacgcttttctcttttcccttttttgtcaagaaccagctcctcttttacttgtcgtattttattggtcaggatgagcagggctagaactttaaaatactcaaaacagtttgggttcctgttttctaatctgtggtgcctttacatagggttgagacccaacaacatagtctttatttaaccatagaaaatgaaaatattcatgtgctgtctgaaaatatagtatttggaagaataacaagtaccatgtctacattattattattattattattattattattatttttattttgagacagggtctggctctatcacccaggctggagtgcagtggcacgatctcggctcactgcaacctctgtctcctgggctcaagccatcctcttacctcagcttcccaagtagctgggactataggtgcatgccaccacgcttggctaatttttgtatttttgttggtagagatggggttttgccacgtagcccaggctggtctcaaactcctgggttcaagcgatccacccacttcagactcccaaaatactgggattacaggcatgagccactgcgcctgtcctaattatttctaatgattagtatttgcatacctagtgacggatgcaattaagagcatgttctaaaaaaatataaactcctaaatacaattaagtattatcttgtcacctttcattctttattactgacggttgctaaaattaatgctggttttccttattttgctcaaagaagtgcccttttacctacctataccctagcttttggcttgttcacaggtttcctagcaactgggctaatgattgcagtaaaaaataattttttttggtattccagtgtacgacgctatttttaagtatcaaaatactgtattttaaaaaatgtaatactgctattttggtattctaagaagtctgaaatctgaatcatttatatcttgagacattccaagagcattttatgctgcattaaaaattctaattgaacaaaagatcccttatttagaaaacatcttttccatttccattatcctaaagagaaataaaaaaatatatattcgatgaaacaaaacttgtattgcaaagattatcctaataagaattccctataaatggtatatgcacatggtggttttgaaactggtacagattagcctgcaacagcaataggcaagtgattctgtaactataaatggtgacatgcaaaattcgaagctgaactggtgacaacagccttaaaacaaaaactccaggttcctgtcaggaacaatattggagtctctataaagaaataagttcttccaaagggtctcgaagttatttgaaaatggggattccagaggaaaatgtttgggttggtaaataactctctcctcttcattcctctgactaatatggggcacaaacattttttaacagctggaaaaatttgagcaacaaaatgcttggaactcatctgtgacatcattgatacacgcttttatttttaatgattacagttaaagaatcaaataatgttttatttttaaaatttcttatttaaagtttcctataatttatttatttatttttgagatggattctcattccatcactcaggctggagtgcagtggcatgatcttggccaactgtaacctctgcctcctgggttcaagtgattctcctgcttcagcctcctgagtagctgggattacaggggtgcgccaccatgactggctaatttttgtatttttagtagagatggactttcatcatgttggccaggctggtcttgaactccttaacctcaagtaatctgcctgcctcggcctcccatagtgctgggattacaggtgtgagtcaccatgccggactatccctatattttaattccatgttgagttggttatttttgtaatgctttattagtttatcagctactaatttgtattaaacatataaattgtactatatattttgtaaattcattgtagtgcttaatattttgtaatgtttataaatctatgtcttcaaaatacattgtgattagtttaagtgatttaaaacaatttcatgaatgctgtgcactttttgataaaacagcagtattagatactaaaatgctgataattgtcactttgggaggctgagacgggtggatcatgaggtcaggagttcaagaccagcccgaccaagatggtgaaaccccatctcttctaaaaatacaaaaattagccgggtgtggtggtgggcacctgtaatcccagctacttgggagtatgaggcagagaactgcttgaacctgggaggcagagtttgcagtgagctgagattgcaccactgcactccagcctgggtgacagagtgagactccatctcaaaacaaacaaacaaacaaaacttgtcattttcccctggcattgtactccagccactagctatccacagttatccagccactagcagtgttctatctctcctcagtgttaaattcctaatagcagattcttatctgtgctccgttaatcccaagaagactttcggtgggcaaagtgctcagatcatagtcttaagcggtggcctggtggatgagaaagagaatgcattcagatgctagaatgcaaacctgaatttatatctcagttaaataattcacttctctgaacctcagttttcatgtctttaagagtagaatgccattgtctacctctgggggcgactgtgattgttaaatgagaatgtatgtcaatgtgactgcttcctcaaccaatggtgggtcccttctttcccttcctctgtgaagaaggtgttttctctgctggaagataaaagccatcgctggagtgtggggtgtagaatgtctgatgaaacagggctcctttgtggggaagcaagggtctttgacggccgaaaatggatctcactgcagcaaggtcaggagaggtaaaaccagccgaggaaaacccaagtgaggagcccggaggcccggagtcagaaagcaggctgctcagattcacatttcattggaatgcttttctcctttgatgcatctcaactggaagagtaaactgaaacagtgggaactgcgacgtggaagcatcttcatttattttctgaggcattgtgaggttacccagaaggaaccgatggggcccgggagtggatgtttgttttgaagaatattacccgaagagtggggaaggagtaggggcaagttggcttttctgctgttcctttggaattgagtttgaccttgcaagtggcctcaggaaacctccagtgaatgatttcctagtggcaccataagactttgtgtcacttctttccttgctaagtaattcagatgtcagtaagcttcgcagccaagaaggctggtatgcagagttcatcatttgtagtgattccatgttcaccagattcttgcataccttggtgtgcttttctgattgcatgatataaatctagttggcttgaaaattttggctgataatctcttttggataccacccaggctgcgatgcgccgtctctgcaatgtgccatgcatcgcttcatgaaatcggtttttaaaatacttgggacattgtttatttaactccagctttgttctgggctggttacacaggcccatttgtgaagctttcacccccttactggtcatgtccatatgaaccactccattgtgaaaagggtcttgctccccctcatgcccctcatcttcctctcctaactataagcatcagcctgggctcatcgtaggtctgtataggtagtaactataagcatcgtagggctcaagtagtaaataaatctacttttattcaggcctctgagaggtcaattatgtccaaacctttgtagctgattgctatggaaactgtatttgttcaaattaggactcaattcaatatatcaagttcctccaaggagctgctccatccaaagacagtaacagtctctgtccactggcagtggttccattggtcaggtgaattgggtctgccatcttgaatgggccagtctgtctcctgggacttgtactgaacatccctcactctccagcaaagtacactttccttatggctgggttcccagaagctggagttgggaagggatctagaagattggttacttaggtcagtggttcatgatctgttttaggttacaagtttcttggagaacttgatgaaaatcctctgcctaggaagatgcacatgcagatgtactcatctttcattcagcaagtactagctgagcctctgcaaagcaccatatcttgttctagaggctgggatacagcagagaagaacattgatgaaattccctgaccttgtacctcagccttctgggtttgagagggggaaggtagacaaaaatagtcattgagaagcaaacatattgcatctcagagtgtgatagatgctacagagaaacatatagtaggggagaaggggagacacattggtggactggcagagattggtacctcttcctgctggctccatggacttacctggagcctgatggatgagtagaggaagccgggctaccctctgctggctgggaccatggattgaaacgtgtccagagggtgggtaaagagggggtgcttcatatgtcacagtaacaacagtattctcttccactgaagacctcctgggtaatagggcaggggcctggcctgggtgggaagaggcaaagtaaggaggatggagctcaccaaatctgtgccatggggtcttccctggctctctccatttctcctgcaccctgcgataaccttctagctctagttcttgtcttttcctcttaatgttcagctgtctttgaattaatgatggtgaccacctccttctagtgactacatttttccacacctctggaccttgccctgttctgtctctcttgacactggcccagctgccccaaatggctcatgggtgtgggggctgtcacctatttagcaggctggatagcatggcagttgagtgctcatgattcggagtgaacaacctgggtttgaatcccagctcttccatctggttgcctttgggcaagtcacctgtcctctctgagtctcagtttccctatctatgaaagggaagagaacaggaggattaaatgagatcacacatataaaaggtttggactagcatggggtaagcactcaggagatggcaggttttgttgtagtactagtagttgatgtgctcatggagttggttttctgaaggaatgtggtaagagactggtgattagaaacaggtgcagagtcatccactgatcgaacacttgttgagtgcccttgcatgccaggcactgttccaggctctagggacacagttggggacacaatagacaaaagtcttttctcatgtatctgacattctagtttgtgacatgacagataagtaagtagggttatggagatgtatggatataaatgaataaatttatttttattattattatttttgagacagagtctcactctgtcacccaggctggggtgcagtggcacaatctctgctcactgcaaactctgcttcccaggttcaagtgattctcttgcctcagcctctgagtagctgggattacaggcacccacaactacacccagctaatttttgtatttttagtaggacggggttttaccatgttggccaggctggtctcgaactcctgacctcaagtgatctgcccaccttggcctctcaaagtgctgggattatgggtgtgagtcactgcacctggcccaaatgaataaatttatatacagacttggctgtgtggctttcagctgcaagtaagagaaaactcaatcaacagtagcttaaactgtaaagtcagttattattttcttaacaagaagaataaatagcctcaggatttgcactcagggatgcactgatgaccctcaatacatccatccttcagctctagtttcctcagtgggttggatttcatttagccttgttgcctcatgagcacagaatggctgctgcagctcctgacatctcttctgcccatgatcatgacccatgaaggaaggcaaaaagggaaacaaagggccttcctcctcctgtgactctcccttttatcagggagcccagaagcccttcacaaactttcctttgcagctcattggctaaaagcaggtcatgtgcctggcgatgaccatttgttggcaaaatagaaaaggattactgtggctggcttagattgttgttgattcacccctggtgctgggcacattgctacctgaacataactgaggttcagttaccaaagaggaaggagaaatggctgtcaggtaggcaaccaatgctgtctgctttccagcaggcctgagcgtctctttggaagagagaagttagtggtagcagctgaaggggctctttgggtagacttggggtttgagagtgccaccttgggcctctaatgtcatagttcaatagcgagttgaggaggggctttctccctttatgctgtgtgggacacaggagtggcatctggcatgtccacggagtgccaagggacaagaagcagcaggtgtgcttgagaagaaagcagaaaatgtcgcacatccctgagggccgccctcactggcctgtggacatccgaggcaggtgctgaatgcaggataaatacctacaaacactcctacacccagaggcttctgggatgccccttggatatccacaggcacagcagaggcaaagtgtacaaaacggaacccagggcctagctccctgcctctacccagcctgctccccacctcatctccccatctcagtgaacgagaatatcaccattcatccagcagccagcataaaacctgggtgtcctactcaatttccacctctccctcttccctcatgggatccctcatcaagtcctacggatccttcctcttctctagatcagctccatctactgttttccacttcggaagccagcaccatccttcaagcctcctggatgactgggatggtcttttaactgtgcctcaccacctgtcacccacctccaccttccccaacctggtctggttttcccactgcagccagagtgacctttataaatgacagcattgagcatctcttttctctgcattaaaaaaccctcctggcttccctttgcctttaggataggatcctgttcttggcccaagatgcctcctaccactcaccatgcggcctcagccttccctcccaccccatttcccccatctttccccctactcttcctaaaagggcccagtcagtctctctcttgcctcagggctttgactgtgattttctttcagctctgaactctctctcttcccagccgccttctcccgctgcctagtgcttttcattttgtgcattctagttaaaatagcacatccccaggagggatctattttgctccccagactaggctgagaccctcttctcaggctttcctcacactctgtctttctccatcatcaccatgtaccccaaaggctgcttgacacgcttgtcttttctgttggagcctagaagctggaccataggcttcatgacacaggggctggccttttttgttgctctctgacctcaggatctagcccagtgtctggtgcacagcagaggctcattatcatatatcacctaataatcatataaagaatgaatgaagattttcaaagcacaatggaaatgccgagggagtagctatgcatttggggaggtgtaggtaagtttcatgcagggatctgatgtcagttggatactaaaggatgagtaggaattttccagatggagaaagagggtgggtatttccgggagagtgaatagcaggtggaaatgcacaaaggtgtggaagagaacaatatgcttgtagaataagttgtgtagcaagtctgggagaaataagttaggagcagggacaggcagtggtgtcagataaagccaaagggattggcagagttcagtgtaaaaggatctcataagctgtgttgactgtgatcttcgctctgaggggcatgggaaggcactggatctttgtgagcagatggatgagatggtgagatttgtggttgtggaaagaggactctgaggctgagcatggtacctcatgcctgtaatcccagcactttgggaggccaaggcaggcagaccacttgaggtcagcagtttgagaccagcctgaccaacatggcgaaaccctgtctgtactaaaaatacaaaaattagccaggcatggtggtgcatgtctgttattctggctacttgggaggctgaggcaggagaattgcttgaacctgggaggtggaggctgaggtgagccaagatggcaccactgcactccagcctgggtgacagagcgagactccatctcaaaaaaaaaaaaaaaaaaaaaagagactctgggggtggtggactggagggggtggagtcagcagaggaggcggggctggaaggatgttaatgcttattgtgatatgactggaagcaaatttccatccttcctcccaattcctggggcaggaagctggatggtggcacccaccaatgtgttagccctttctccatcatgaaggataactcgaggcagggcatccagtgccagtgggaactggtgagagggcttcgccatcaccctagctgtcatccgcgtgaccagatgggctcatttgggtggaaatcctcccccctgctcccccagatacagtggctcatcctgcctgacgtgctgcaagcctgtcgagctgctcagggtagagccaggttgggagaagtttgggatggagccaggaaaggcaatcaatggagtttattaagcattcaaagcaggttgttgctctctggcagatcagctgctagtttaagtacctgtgaaatccacagtaaacagctgcctgcccactggtgtcaggagagctggcttttaggcagagccagatttgaagatgcagaaagacatagatccactgtttctttaggatctgttatgtgcccggcaccatcttacttaatcctcgtgcaatcctcccagggaagtattatttccatttttaatagaagaaagcaaggcacagagaggttaaggactttgccccaggtcacacagcaaattcccagtgcagcaggcaaagcctatactgcctcttccggactagctgcaaacttttctaattttgtcccagatatgttttcactgctcagtttacgtccctctgcaagtataatagccaatgtttattcaacacctcacggtgccaggcactgttcattatgttattctaaatccttgcaacaacccatttgaggtgagggcatttatcccatttctgcagatgcagagttgaggctccaaaagctggaggggcttgtttgagcatacacagctggtgagggtaaaagcaggtttgcaaccaggccatctgagctcagtgtgagagagcacccatcttgcctcctctttctctgtttagacagcacttctttccatttaaatctttccccagccctctcttcctcatcactccacagcagactctccaccctggcacttctgctcagacctgtcagtcaatgagcaaagaaagtgagcgagtatgctgtgcgtgtgttgaaatgagtcggcaggtcgtccaagcagacgtctccagacagcagtatgcatcgccattgacagagtcaattactgcggccccaggaaagggctgtttagcatcttgaaagaattaaccaaacagtgcataattattgcaaatcaaccgcctcttaattatatctgtggctccattatgcaccccattgggctccagcccctgcaacccatggccctggatttggtacatcccctttgccacagcccacttctcggagaagacagagctgtgcgtgtgggaataacggctctcctccaacgatcagcttaaaggtcatgtctttacttgtggacatttctaccagaaatatggaaaaagagcaaagttgttttaacaggctccaacctctccgtgctgccaaggagctgtcttctgccagattcaattcagttcaataacaacagctgcctttcctgggggtatttcctgtgttctaaacacttcctgtaattctcacctgcgcagaaggagttggtatcctccattttacagatggagcgactgaggcttaaaggtgataggagattgcacaaggtcatctttgaggtaaattgcagaatcagtattagacccagggtctacctgaaatctgagcctgcgtgttgcgctggtagatcatgccgtcctttcccccacaagtcaacccagctctagggttgacttgttcttggggagagcagaggagtgcagtcctcagcccttgccttcagcatccccatcccttggctgtggtgtcctcgcctcttcaggtctagttagagtttgtctccaaccccattttacaccagtggaaggttggctggttctgtggtttaccccatagatgaccttttgcaagtctcacacctttaagcctcagttgccccatctgtaagatgagggataccgactcctcctgtgcaggtgagaattacagttcaagttttcagcttgagaatttagctcaagtttctgagaagcccctggaggttttcgtctctgttgctctgggctggcctttgacttttctggctgactttctctgtgccgcacaatgttgattcagaccttttcctctgttccccacagaataaccccgactcacaccaggcattgatgcatgaaatgggctttacagaaaatttaggagaagataaagaaatagtttatgtggctgagattccaacaattttcaattgaatattaggcattctactgttgttatatgtaaactttctattcgaggacatacagaaagtaagtcataaatgcacggcttgatgaattttcacaaagtgaacacatccatgtaaccagtgcccagagtaagagatagaacattccagcacccacaaggcccccaaaactaaaaagccctttccaggttgggtgctgtggctcatgcctataatcccagcactttgggaggctgaggcaggtggatcacgaggtcacgagatagagaccatcctggcaaacatggtgaaacctcatttctactaaaaatacaaaaattagctgggcgtggtggcgggtacctgtaaacccagctacttgggaggcggagcttgcagtgagccgagtgtcgcactactgcactccagcctggcaacagagtgagactccatctcaaacaaacaaacaaacaaaaacaaaaaaacttccaaattcttcaattcttcctttctccatgcactttgcatatagaatgcagcaagtattgtgggaatatttactgtgtgctaagcgcttttcatgtatgatctcatttaatcatcctatcaactctaagaggaaggtattcttattgttcccattttacagatgaagaaactgagacctggattaatcagcttgcccaaagtttttctgctggtgatatggtttggctgtgtccccacccaaatttcatcttgaattgtagttcccataatctccatgtgtcatgagagggacccagtgggaggtaattgaatcatggggcgattacctccacaattttgtgctagtgagtgagttctcatgagatctgatggttttataaggggcttttcccccttttgctcagcacctcttgctgctgccatgtggagaaggatgtgtttgttttcccttcggccatgattgtaagtttcctgaggcctcccagccatgctaaactgtgaatcaattaaacctttttcctttataacttacccagtctcctgtatgtctttattagcagcgtgagaatggactaatacagctggtaagtagtaatggcaggattcggacccgtaaccccagcattcctattcttaacctctagtttgggacagtgtcaggcactggattcctctgcgtacggtctctgccctcatctagacgctagctttgctctccaaaggcagagtctcataggtggctctttggtatctgatatggtgcagaccatccaggaagcacctaataaatgctgaatggatggatgattaaacaaaaagcattgtttgagggtcaagttgtttacttagatcacagcttggagagaaaaaagctctgtaggatgcagttattctcaagaaaccaaccattgctcatctcttctgtgcggcagtgcctttgcagagcataagcaatactttggtctttgtttcatcaacatttccttgccttttaatttgtggtaagaggacgtgaagggaaataaacatatagtgatgaggtggggaaagcctttttcttggctccgactaggggaggcatggaagatgaattgagttctgtgccatcctctcaaagttcacgctgtttttgctccaaagttgtttccctgcatgatttattgtgctatctggaaaatcaattttttcttcttgggaccacagaagagtctgtttcaaaacacatttgcacccttaaagctaacatattcagtcttactgcctctggtatctgtaagcagacccattccatgctatttttaggatcatttccagaaaaataatttgtttcattgtggagtctgtcaagctaaatggagttattttctttgtggagttggatgagtaaatctagtcctaagaaaatgaggatttaaaacatttcctgcagagagctcatagctgggtttatcttatagattaaaataaaaaggagctaccagaaggtctgtgtgtccaatacactttgttaccatctatcaagtctattttcttaagttgtcagagctgtttgcattcataataatagctttatcaagaatcagctccttttctagcatcaaaagttaagaatttaggccaggcgcagtggctcacgcctgtaatcctagcactttgggagactgaggcgggcagatcacttgaggtcaggagttcaagaccagcctggccaacatggtgaaaccatgtctactaaaaatacaaaaattagccgggcatggtggcaggcactggtagtcccaattactgaggggactgacacaggagaatcacttgagcctgggagacagaggttgtagtgagccagcactgtgccactgcactccagcctgggtgacagagtgagactccatctcaaaaacaaacaaacaaacaaaaagttaaggacttagactttgcagctgaatggatcaggattcaaatatgtgcaagatgttctacctgtctggcctcagtttcttgatctgaaaaaatgggaagaattaaaggacctacgtcatcaggttgtaaaggccttaacagcatggtaaggcatgtggagtgggatgcacttgttcaggcattggtggcccagggtatagggcccgtgatattttcaggggcccacaaaaaagtttctgttttggtttctttggctgggtgcagtggctctcacctataatcccagcactttgggaggccgaggcgggtggatccctgaggtcaggagttcgagactagcctggccaacataacgaaaccccatctctactaaaaaaaaaaaaaatcagctgagtgtggtggcgggtacctgtagtcctggctacttgtggggtgagacaggagaattgctcgaacccaggaggtggaggttgcagtgaaccaaggatgcaccactgctctccagcctgggtgacagagtgagactctgtctcaaacaaaaaaaaaaattcttttaagatcagaaggaaaaaatgaatatagtaataatgaatgcataataatgaatccagcctagattatatttgtcttttataccaacatagtcacaaaatatttttaattataattatatattatataattagattataattatataatatataattaaaataattttataatataattttatatagagggaggagcccatgaaggcaaatgtacctagggctcatgaaagtcataatatagccctggagtgtatcaaatgggaggatatattttttaatcacacaaaataagttcagaagtaggcaggcagtttgagacaggtctggccactccttggtctctaaggtcctattttttcgcaccacctccctcaagcttgcctcatggaccaaaatggctgctagagctttagccactgtgtctgcattccaggcatcagaaggaaaaaggggcaacgggcaaaaggagcccacttcccagctggggcacctctctttaaggaacattctgccccacaacactgaacttggtcacaaagctgcagcttagctttaaggggggccgggacatgtaatgttttagccgggcgcattgcctttccagatacaaggtgggtttataccaaagaaggtgagaacaaggccagatcacacaacccagaaagaaggagatactagctctctctggcaagccccttgacagacaggaagagggagacggagtgagctgacagactaagttctccagccaggcgtctcacctgtggtgtgaggctccatcagttccaaaagggggaaggacaaacaggcacaggtggggctcctgtcaagtcagagggtcgggaaggggagagtggagggatcaggcagaggtgtgatctctgtgccccatcctctgggttcctcattccatcaggctgccacccgagtataccctgctaggtgaagccacccctgacccccaaaactcaacatcaagcctcctttcccactccctgactcctcaccttgtgttattttttctttacagcacatttcactgcttgcgattctgtggattcatgtattgtctgcctggcctgccaggctgtaagctgtctgggaggcagggatgtacctgtcctgttcatcacggtatcctgtctccagcacctcttgcctggcctgtggtgggtgctcacacttgctgaaagagtggccctgatgcagaaacatctccccctggccctgggtaggctagaccagcatgggctgtggcaccttcctcccgctcttcagctctcctgcttcattcatggtgtttcagcaaagggggctgagagcctccttgtgctaggtgctcttctgggcattgggaattcagtgataaacacagacaagaatccctgcttacatggagtttatctccagcagaggagtgagacaagtaaagaggctagctggtgatatgaggtgtaaagaaaactgaagcagggaagggctgagttctggggttgagtgtcttcattttatatagaatggccaaaggaaggcttggctaagaagcagtaacagtggagcaaaagcctgcaggggctgggggagccagccgtgtggacgtccagaggaaacatgtctaagcacagggaacagcaggtgcaaaggccctgaggcaggagcatgcccaatgtgccgaagaacagcaagggggccagtgtggctggcagagagtgggaaataatatggtcacatagggtcactgccagaggtgcagtttttattgtgaaggatgtggggagccctcggagggtcagaggcagagaagggggtacaatctgacttctgttatagaggattccttctgctgtgtgttgaggactggttgtaggggcgggagtagaagcagggactccagtgaggaagctactgcctctcccaggtgagaggtgaccacagcttggatcagggtggaggcagaggaggaggtgaggagctgtactttcacaggatggactcttctcttctcacccagaaggcattcccggtggccccatatatctccctccctcagcagtcaagtttctgtgggggtaggctctacttcatcagtggtatcacatctgtgtcacattacccatattacacagtggatgcagatgtgggggtttcagctggcaggctccaaggtgaatctaacctgcaggcaaggtgttaaacccattttgaactgtataggagcatactgctttctggttttgccacagacctcactattctcttgtttgccaaacacttccggtttcacacatttgtattatccgtctggctccagaagacatgcgaggttcgtatgaagcagggctggtaactccactctgtaccaaccgagatatccatttcacagatcttgttaatcccatttcacagaggagagcaacttaattggctcagcaatgaaatgactaccccaaggtcatgcggttctaaactggtgattgtggctttctggtttttaatgtctctccactccatcctaccggccttacagctagtgagagttgagagagaattctcttcctttatcagacagatatattaccctacttgtaaatagatgatttcagaaacagagtaatggtgaagagaccgtctaacttgggtttgcactcccttccacttctaggtaaagaacggaaaacattcacccgtgtattcctcatttgcattacaagagccgggcaacctgctgattttactgtgtacaatgaagctttcacaaagcatgtgtgcttacgcttctccaaatgaagggttgctctccaaaagacggtatctgtagcacgtgtgtggtcgttagcacctattattatacatttacgttcatagctttgtagcttcttactccacagtcctgcctacccttggtccttaaaagcaaacttcggagggtggttcttactgaaacttgccatattctgaattaaattttaaagacttgatgacacccttgctggggaatgagaattcaacagagttaaaattatattcttaagtgttcctggagtcagccccaagtattaaggtactcagaagtaaaaaggcctttgccctctgtgggtttccaggaaaagaaaagaaagaaactgaacagtcatttacctttttctacatttccccaattttctcaatctgttcccatagcaaccctaatagagattgggttgctagaaaagcattcatttctatagaaacaatttgttctatatgagaaaaagtttacttggtagcacatgaaatctaatattaggagtttggttttgttggtggattttttttttttttttttttttgtcagccagaagaatatttcccaagccacctacagacgtatgttgcatctttaagctcaaaatttcatctcctagtgttttctcaaattggttttggatggaggttgcagagtctcagtcccttgggatgttgactaagaatacaaaattttaaaaagtttagattatttgcatactcaaatacaagggatagactagatgatctcttgaggggttttgtttttttggcccaggaatatgctgtttttcttgacgttgctgtgaaaatcctgaggggttttgaatagaacaaggtagacagctttggatgtaagcagcagaagctcaactcaaaactattaaacaaacaaaagaggggaatttgttaattctcggattttagaagtctagaggtttcaggtatggctggatccagggcttatggagaaagtagcttttccctccctcagctctgccttccactctgctggcttcattcccaggcaggctcttcttaggacgctccagaagctccagtcctaccccctacagcttccagtggaaagacaggacctcttttccaatagttcccggaaaagttctaagtggattgacttaggtcacatgcccacccctgaaccaatcactggggaccgggaagggaggagatgagctgattggccagacctaggtcaggtgtttccctttggagtcagaagcgagttcagcatctcccagtccccacagactaagagatggaggaatgtttctaaagtggagaatcagaaggtggaggcagctaaaagggggatggatgtgatccaggcaccagttggtcattccagtgactgattccaaatggctgaagaggacccatttgaccatattctcaaattagggggctggtccttaaaagcttgctttatcccagctggacagagagagggagctgaccagttagggcttccctttcccatcacttcatttttctaattaatctgttaccagctccacctcaagaatatacttcaaacaagatttttttcccccttctaaagggagttgaaaaaaatcagaatacatttgcatgctgcctaaaacattctgaacccgtgtcttatcagtaccactgaacaaccttgtcttttcagggctggtagctatataattatagctaccttcagcctcgccagctctctcttgaaaaggttatcgtgaacaggggatgaaaaatcatttggaaacatagcctaggtctgtttttcaattgtcttttcatcccatagttcagagagttcgagaaaataatgtgttagcagcacataagtaacctcatatacatatgtttattttttaaatttattttctattttttgagatggagtcccgctgtcgcaggtggagtgcagtggcgcgatctcggctcactgtaacctccgcctcccgggttcaagagattctcctgcctcagcctcctgagtagctgggactataggcatgcgccaccacacgcagctaatttttgtattttagtagagacggggtttcaccatgttggccaggatggtctggatctcctgaccttgtgatctgcctgcctctgcctcccaaagtgctgggattacaggcatgagccaccgtgcccagtccatatatttttttcttgaaaaaaatatttcgtgagacgattaaggtgcgaattatttcagggaaggtgttggtgagtggtcagtaatttaaattaacaggatttccggggcttatttaagagcctaaaatagaattgctaaaattcagagagcgttttactttaacttctgctatagggactcttttgccttaaaaatgctttgttttcatcgccattagcttgcaaagatattttaaaagtttaaaatatccttaggatttttttccttgttaataaactgggttaatgatttccatggagattacttccaacgaggctcttgtattttaggcaagcagctatcctgttgggatcagaaaggaatcatttgaaacctttaatctcctagcaagactaagtgcttctggtgaatgaacccctgggtctcagtgggacatttgagaggccctttaaggtacaaagcgctgtgtttcagaagacataatctttcaagtaggactcacaagtgagggactttgaccagcctggttgagggaagtgtgtgcatgcctgtgtgtgtgtgtgtgccttgcacgcattgggggttgggaaatttgtgttctgttagtggagggtgtcctttataacactgagaatgagggtgatgttctggtttaaaacccctgtaacttacatgaacttccacgagcagagacgggtgttgttgagcagagtttcctgcacaaaatgtacagttgcatcacctggcatcttgtcaaagcacaggttctgatgcaggaggttaaggatggggcctgggatttggtgtttgtgacaaactcccagataattccatccccatgctgctggtccctggaccacacgtggagtagagagagtacagaccacttcgtttcacctccactgggaagagaccgaaaatcacattttggatcctgccagtccttagcagcgctgattctggtgtatcttgggactttatgtcatccccgaaaaagggatcccctaagaagggtaaagcccgaacaccttttaagtcatcagttctagactagctgatgtcctctaatcctggcaaggaatctggctgcaggtaaatggtggttgcaggggagacagatcagcaatgattcaggcaaaacttttcttctaaagcagaaatgataaatgaagcttattgtttcttcagaatttctttgtgtcattctcagctacggggactattaaagtatatttcccaagggagtggtggtattcggtgatgtccttgttcatttagctgaaggcagatttccctgtttccctcaatgggagatgatcttgtacctgagtctttagtgaagaagcagctacactgaagcctttcatcagaattctcaatgaggcagcagactcagagagaagaaagaagcaggcccttctgagctttttggagaattgcaaagcaggcagcctgtatcaggtagctactgacatataacaaataaccccaaaacgtaatggcttcaaacaaataacctttttaagaatattttttattatggattcagggggtacctgtgcaagtttattacatggatatattgtgtaatggtgaagtttgggcttctagtggacgcatcacccaaacagtgaacgttctacccaataagtggtttttcaacctcactctcatctcacccttcccccttttggagtccccagtgcctattatttccatcttgatgtcctttcaagcaataatttttaaaccattatactatccatatgtatcccataacatcatgttgtaaacctcaaatatacacaataacatttatttttaaaacataaatcattttttaaaatgaaaaagccccaataaccttttattatcatgattatttctcatgagttgatgtgtaggctgggcagttgtgctgatcccagttggtcccattgatttgtccatggtcagctggtggttccgctgggggctggtggtctagcatggtctttgctgggaccacttggctcttccacctaccaccacattcgtcacagtctgacacgttcccatggcggtggcagtggtccctgagagagctatagtatcccaatcatgcaggaggacaagtgggaataccctcaggcttttcaagctctgctggcatcagatgggctaacataccccagtggccaaagcaagtcatatgcctgaacccagagtcagggagtgtgggaccagaaagctgaagcaaagagcatgaatgcagggaagccattagtgaaattcaggaatgaacaagcccctctcttaatgcttgagactgagtttgtaaatctctgagtatagacaaaacttttcattcattcacttattcattcgttcattcatgaaacatttattatttctctcttatgcaaagcactgggctcagtcagacttgacttcggagttttacttgccttgagatctacacccacttaacttccacctccagatcgtctccatgtggaaactgcagaaagcttttgctgactcctcagcggggcccgtgggacctgtggaatcattctgtggaatgaggcagagggtcccctccccaacgcccacagggcagctactgcctgttgccatggagatgctggatagctttaaacagaccctacctgctacccacttctggggcggctgccttgcaagatgaaagggcctggctagaactcagaaggtctgctgtcctcttaggcccttgggttgatcgcctcatggaggctgttttgatcatcatcatcaatgcaaataattaaaatttttaaaaacaatttttgtgggtatatagtaggtatatgtatttatgggatatatgagatgttttgatacaggcatgaaatctgtcataatcacaacatggaaaatggggtatccatcccctcaagcacttatcctttgtgttacaaataatccagttatactgttttaaaataaaacagtatgtacaattaattattgtgcattttaaattaaatgtacaatttaattgtacatttaaaaataactcaattatttaaaattatttaaagtaattatttaaataaaataaataaataaataattgagttatcttaaaatgcacaattattgactatagtcaccctgtcgtgctatcaaatactaggtcttgttctatttttttgtgcccatcaaccatccccacctccccaatttcccactgcctttcccagcctctggtaaccatccctgtactctctatcttcttgagttcaattgtttagatttttagatcccacaaataagtgaggatgcaaataatctttccctcacagtttcgttggtttggtttaggtggatttagaagcatattgtaaaccctaaagagccatgagcatgtcagggtttattacaagtaggaaggagaagccaaaagttctctcccagcgtggtcatcgatgatgtgctgggaaactggatgtgggaagggccggggaagagcccaggattagagtgattgctgatttccttggtgtaaatacatcatggctgatttctatcaaggttgctaccaatgatttaacaacctacttgtagaattctcctacaaacagcatcatgcttgaccttacagcacccatatgaaggaggtacacttttgacattctcactttacagatggaacaattgagattcagggagggaggctgagtatgtgcccagagtcccacagctacaggtcccacagctacagctacagggtatgatgaggcatgtcagaccctccattttcccacatttaatcactagaacacctggatatttaacaacttgctttctcaagctggtaggagccagttctagttcccctgacttagctcaggtacctgcctgcctgggtttgaactggccccgccttttactgtctcggtgattttgtgcaagtgactacgctctgtctgttggtaataaggggatctaacagtacctgccttctagggttgaaataaagattcaatgagatgaggtgcatgtgaggtatctcacatacagtaagtgctcgatgagtgccagctgttacgggtgctacagctctagggcaagtgatcatgcaagggtctgaggagactacgctgtcaccacagggttccctagtcctgtcatctgaaagttgttggttcaccccatttccagcccatttttccacctaagcacctgtgagtggagcttttccagcctcctacaaaccatccattcatctcattctgcagagctcagcgagcacttcccttgtgtcgggctcctacaaacagcatcacactcgtcctcacagcagccctgcgaggaaaggacatttttaacatccccactttacagatggaacaattgggtttcagggaggctgagtaggtccccagaatcccacggctacaagtcaggagagtcaggattcgaatccagagtctttgtgtctaaaccaccctccccctttttcgaaagaaaaaaacaattatgtagagtagcttcttgattttatatattttctttttaaaatagccttattgaaatgtaatttacatacataaaattcatctttcaaaagtgggaaattctgtggtttttagtacattccccaaattgtgcaaccatcgccgctatctaactttagaacctttccatcagccccaaaagaaaacccagacgccccctcttctcaaagaaatgcagaggctctggacacatccatctctcagcttctgcagaaaccacctgcagctcagcccactgcccctacaggtaggtggggagggaggctcttaagcagaatcattttgctcacattcactgaaaatctccaggtccctaaaaagctttgcctgattgtattgaactatttattgccctccctctcagtgtgaagggggagtatttaattatttccagagacacaggctgttgtcattttatctccttgatctccacccctaccgcccttcatggtttcgggagaaagctgctgggtagaaggtgctggtatcttccttgcctgtgattagaagcctctctcattggagcttttgcttccgctcgttttcccctttgcctcctttcagctgccccttcccgaagccgaatatcacctgattttaggcgctggggataaaggagctgtgattgggacctcctggtgtgccaatcaaacacagaaatgaaagattggtttttcaagacaaacctggaggcagctgtttggtgcttaaaaatcaggctgtgtttaatcactgaggggaaaacgtatcaattgcagtctgatcacagtattgtctaaacagccccgggaattggtaaatgacatgtgcagggtatttttagctcatgtttttagaagctgaacagtttatcacctccccacccacccccctgccccgaccttgttacccctttcaggctgatcctctgtgattctgctagtttcaccttccaaggggctgttagatatgcaaaccgcattcttctcccttaccttccagactttttctttgttcagtggtggtggctgtaagggagagaagtggttgaggaaaataatttatctttggctgtttttgaggtttgaggttctccgatgtgtaagcagtggctcgtgtttgcacttcctgaatgccttttctcaccctctagtaaatgcctattggcatttgggaagaaagaatttagcaacattccagttgatcccagggttacagagagagccagtggcaatagacctcctgggaccctcacccagtgctcttggggtttacgtcccgggttgtacatttaggcttaacggcctctgtgtgaccttgtccacaaaacaagacgtttcgttcctttgtggaccccaggggctttcccatggaaggaagtcgatgaattcttactaaaggaataaacttcagaaccaaagcccgcgagtgttcggtgtactttttcttctttccttatcatgaataagccggacttcccaattgcaatagcacttgaatggcatcattggcaatcactccgatggcgcaggtcctggccggctgcttcccatgtgcagcctcttatccccctctgagggcagggtttctcagccttggctgttgatatgtggggcacttggcaattctttgctgtgcagggctttcctgaatattacaggatgatgagctgaatcattggtctctactctacccacgagcatccccctctctgtatgacaacctcaaatttcttcagacattgccgaatggaccctgggcaaggatggagggggtcaccccccagttaagaaccactggagtatttggggaggcaaaaggaaaaaaaaagtagactgaaaatgtcagaggcattcgaactagagcaactccatcttgaataggggcggggtaaaatgaagctgagacctactgggctgcattcccaggaggttaagacgttcttagtcacaggatgagataggtctgaagatacaggtctcaaagaccttgctgataaaacagcctgcagtaaaaaagccggccgaaacccaccaaaaccagggtggtgacaaaagtgacctctggtcagcctccctgctccttatacactaattataatgtatcagcatgctagaagacactcccaccagcaccatgaccgtttacaaatgccatggcaacacccagaagtcaccctatatggtctgaaaaggggaggaaccctcacttccagcaattgcccacccctttcctggaaaactcatgaataatccaccccttgtttagcatataattaagaaataactataagtataagcagctgagcagcccatgccgctgctctgcctatggagtagccgttctttatccctttacgttcctaataaacttgcttgcactgtactctatggacttgccctgaattctttcttgcacaaggtccaagacccctctcttcatgtctgcatcgggacccctttccggaaataacatcagggaggccgagcacggtggctcacgtctgtaatcgcagcactttgggaggcccgaggtgggtggatcacgaggtcaggagttcgagaccagcctggccaagatggtgaaaccccatccctactaaaaatacaaaaaaaaaaaaaaaaaaaaagtcagacgtggtggcaggcacctgtaatcctagctactcaggaggctgaggcaggagaatcacttgaacctggtaggtggaggttgcagggagccaaaattgcaccactgcactctagcctgggtgacagagtgactccacctcaaaaaaaaaaaacaaaacagaaaagaaaaaaacccagggaaaggaaaagaaaacaggaaagaatcacgcagggagaaaagaagtgtagcacagagggaaacagacatgggcggagtttgactgactagacctggccttggtcctgggccctgcggctgacttggctaggggaccctgggcaagacttcgcctttcctgtgccttggtttcatctgtaagatgagcacctgccacacagggtttgttgcaaagagcaaagaaattgccttttgtgaaagtgctataccagtgcaagctttttttgtgtatgctactgacatgtgtgtattgtcagatcaatttctccttttgccagtgtcagattcacctatgacaagagacagtcctgagtttaccatatgctctgtgaggattagcagtatgtcattgcattctcatttatggtcagagaataatttgattaaaagcctgtttggacaaggtgcaaagcaacggcaatggcagggccagccagaggtgacagagttttgtggaagagaaaataggtttggaattttcggttctagaagcctctgcatcatctctcgtctctcccgtctttgcagaattcagccgcaggactttctcaagttgtttggaaaacacagctgaaaattatacctggcaagtatggctctctgtccacacacttagggagacaagaaatagaacattcctttattttctttaaattgacttgaagcctccctcacttgttcttggttgggtacagaaagatttggaaccttacatagccccaaatgcctggccaggcgctgatggtcacctgtccacatgggtcacgttggagacatatattgtcccagcccatataatgtcccaggttggctgcttccttcctagccactcttggtcagactgagaccctgtggccatattccctcccaagggcatgacactgccccatccacctgcagcatggccaaggatcagggcccaggatcccagcttgaggaatccttgtatgctctggggtcacccctccctctcccttcttgtattcctcagggacgctcatgtctgctctcctggcatttcaggacgtgtgaccaatcccacccatgagctatgtgtcctttgaaaacaaagtttcagctttcccaatcctgcaaacactctctcccctccagaccaggccagaaagcacagagttagcctggctaaaacagaggatgagaaagtgaacacacagggagaaccccagacactaacatttcaaaaaacagtcctgccatttatttctcatccccagcatccaggcccacctggccaagtttccaaagtggagagaaccatccaagactagagccaggggacatggacgatgctggcatgtagtaggtgctcaatgcacagctgctccatgcccaccactggaactccacctggtgggtgagccactgaagggagaattggggtttgccattcttccagctgccttcgtcatgttcagagtcatttgtgttctctgctctgctgctcagtacaagttgggaagcttctcagcatgccaaaggggctctttcttctttaatatagcattgttaccctgacatttccctaactctttcgtccccttccatcttcatggttgtcaaggaaacagtttcctgggcaacctgttgacttatttggctgccaagtttgtattatccagagtggggagctgtagtgaaggatttttttttttttgttaatgtcaccaaggtaaccgccagcagccgtttaattatagttttaggtaaagatgaattcttttttgcaaatgttcatgtatttttggtttggggtggggtggggagaagaatcgccaggagattagcattctctaattatatgctttcagttgtggacaattcagtttcatttgcaatgaaagttggtttcattcaggattaattttttctcctttaaaaaatcagaaaaacagatagaacaatgaaaacaaagagggaaaaagaaaatcagtttggcatggagccagcaatgagtgtggtggtcatggctggggtgtgggcatggctgaagggatgtcactggtgactgtttcctgcaacataaattcctttgtggatctgagaggtagtgtggtgtagtggttacacactgggactcgggagtcaggctgcctgggttcaaattctgtctctgcagcttcttagctgtttggcctcaggcaagtgacttaacctggctgtgcttcagttcccacagccgccagatgaggaggaaatgggaagaaagagttaaatttccccataggtgtgctgtgagggttaggatctattcattagatcccttagaaggatccctggcgtggcaccagcactctataatatcagccatcatcgtaaagccagggcctcctacagagcacactttacctacgcctgcctacatgttaatcgtttcagcctttctaggcaccagcgtgctaatatgaacagttctgatgttaccgtgtgatagagtcattagaaccacacctaacatttcccggagactgacactgttctgagcaccgtgtctttgctcatttcatgtccatagcaactccagagctgggtactattattgtctccctttcaccaatggggaacctgcagaggaaaagagtaagagttgatgttttaaactgaaaagatcaatcttgtaacgcatttgtgaatagcctccttggagctgtatgtaactttgttttatggttccctccttggcgtctcagtaggttttgatcaaaccaagtatcaaagtgcagggaagtgtccatctggggaggagcacttgcggttcactcttgggaggctttctgggagacaccagatgatggcagattccttggatcctcgatggtggctatgacattcagggagttctcaggcccctgcactctcaactcccctctccggatctgggggaagcaggctgcagaaccccagagctgaggcacaggttgcactggggtggtgaggagcagtccccattggtcatctcccagacaggtaagcaggaaatgatgatggcccagtccagagcaggccgtcaatggtccagctgcatgagctcggggagaggtttctcttgtgctcccaagtaaatcaaggagtttcaatctgccatcttcatggttctccagggtttaaaagtactgtgattctgtaggggaaataagagtcacagatctgtcttttgaacccaggtcagtctgagtctaaagtcttcttttagccactgtgctaaagccctgctgttctgatggttactgaaaccagggactctggagccagagtctttgagttattttctgtcattttctagtgagtgacctgagtaatgtacttctctgtgcctcagtttcctcactggcaaaatcgagacaataagagtacctatctctgggggctgttgtgggcagtggagcactcagaacagtgtatctctccaataaatgttaggtgtggttataatgactctattacacagtgacatcataaccattcatatcagcaagctagttgcatcgtggtggctgatagttaacatgtaaccaggcgtacattttctttatttagagagacaggttcttgctctgtcacccaggtttgagtgtggtggcatgatcacagctcactgcaacctcgacctcctgggctcaagcaatcctgccacctcagcctcctgggtagctgggaccacaggcgcgtgctatcacacctggctaatttttaaatttttatagagttggagtcttactatgttgcccaggcttgtcttgaactcctggcctcaaatgagcctcccaccttggcctcccaaaatgctgggattacaggagaaagccacagtgcctggtctggtatgtgcattttctgacttactcctcaccatcgttattttgatgcttctagtatagttcctacataggtttctgtatcgttaatcttatcaatctatatataacatgcactgtgtaggcaagcttctctcttcatctttataaatcccctagtgatgctccccttcccactaatctccttcaattgagattcaactgcacaggccagcccctgtcagatctgctgtgctaataccactgggaatatttgttttgtgtgcttttttctctttccatggattaggtacactttcatcattttcaaaggaagacctgaatagcaatgaactcattggtcaagagcagtggagttttggcatggaataccctgtaccctggacccaccacgatggagtaatgtggagactcaaggctgattcttagccaggccagtggcttcagaaagggccaggagcctgcagttacacagctccatctttctgcccctccctccaccccctgccttttatttcttatttgttacagcctttcatgaggaacaacagtcagtaacacaaacattatattcatctctgctcattctcccctccagggaccaaacaagtttttttttctgggcattgaaaatacgtctcaccccagcttttaaataggctcaatgttagacagaaaagcacacattctgtagaatgatggaggaagggtaattatgtattaataaagacaaaaaaaaaagagaaaaaggaaaagaaattgttctttgcatcacccgatggctttggcagaaataaaaatagcaaaatgcttaactggttttcctgccagtgggatgaatagggggctggtgctcttgatttgaggccatgggctgcagggctgtgctcagcgtgggtggggactgtgaggactgaggatgaggctccatcaggggggccatttgtgaggacttgggctgcagaaggggagggaggagggaacccacagagaagctaccttcttgtgtctccctgggcctctggaggtgggtggtctctgtgtctttgggcaagtcatatattctttctgtataagatggggataatgatacctgagtatcaaaatcttaccccatgtggtctagcattttcaaggctgcaaacagcagtggtatagagtggaaataaacctgggttggagtcatagctttgccgcttatcagttgcgtgtcctcgggcaagttacttaatctctctgtgcctccgtttccccatttgaaaaatggggaggatgataaaccgcatcgacttcagtattgtggcagaatgagtgaatacatgtaaagcaattagaaccgtgccactaagcatcctctcaagtgttataatgattatattaatatctccattcttattaccgatatccatatagatgaagttcagtgaaactggctcagtttcatgaaagaactgctaagtggaaaaaaccaggatctaaactcaggcttttggactccaaatctcattgaattttctttatgcccataactccttccttacaaatgaaaaatgaagggcctttttcatttgtaaaaactctaacaccggtgatagcttgttaacgagatctaaacacaacatccttcaaggttagacaactttagactgagttttcagagctcacttttctggttctttgcttttttctctgtctgtaaaatggactccgacaacaaccatgatgtaacattgctcatggcagaaactcggttaaaaacaaaatctaggggacaagttgcagggaggttagaattaaccaggtccctggccactgggccctggaaggtcagatggcttccagctggaggggagctccaaccctgtacattccaataggaagccggcagctgaagctttgtctccagggcttccaggttctctggggtttcttcctttctgaccctggaaacagaaggagactcaagactctccatgaagatactttcttctgttggctgaattcacgaggtgggtctgatccatgtatccctccttgcaactcaaaagaaggcagcagctttactttgatacaacctcaggaaaggccctgcattttctttttatgaatctcgggctgtgattcaggaagagggcaagggtggagttggaaatcgcccctcgtggaagtgtgagctacagagaagcggaggaaacctggccgtgtgctccaggatttacctctgtaacccaagatcccagggagcttagatattgacttgtgtagacactttccttgggctgctcaaggtggttcccatgaccctgtaggctctgcgcagtccaggaggcctcataccccctcccctgttctgcatgaggttatttgggagtgtggaaggcaactggcattttgtcctcttaatacatgttaataatgagatgctgctgataaaatgctaccatttattgagagtttatgtgaagtgctttactcatgaaacaagcagtggagtgtggctagcatgctgccgtttgctccccagcatccatcctttccttcttgccaaacaaacctgattttacactgggtggcagagtgcccagctctgggtgaattgtgattgatttaagggttaaactttaagcccatcctaacaatcttgtttttcattttctcagcttcctgtgtagctgtggctagctgcaaggcccattttagaccaacaaaacccacaaggatgtctgctctggtagctcgtgaaaaagctccatttttttttcccctagataacaggagcagatatggctggcatagcccctttgtgcctctttgtgccttgcctgaaattgtgatggctggagcaaagcagcagttttgtagccatgaaagaaaggctccaggctgggcacggtggctcatgcctgtaattccagcactttgggaagctgaggcgggcggatcatgaggtcaggagttcaagaccagcctggccaacatggtaaaacccgtctctactaaaaataccaaaaaaaaaaaaaaaattagctgggtgtggtggcgggtgcctgtaatcccagctacttgggaggctgaggcaggagaatcacttgaacctgggaggtggaggttgcagtgagtcgggatcatgccactgcactccagcctgggcaacagtgcaagactctgtctcaaaaaagttactcagagtgtggtctgtgggccagatcgttagaaatgtggaccccactccagacctactgcactcaaatttgcacctgggtctccaggtgaccagtgtgtacatttgggaggccctgcctacagagccagagacctctgtcctgatcttgtggagctgctgaagaacccttgccaataagaaccaacctctgggacttctgtcattggttttctattacttgcagccaagcgcattcttcactgatacaagcaaaacagccttaagggaaccacctccctgagaaccctatccagaaaggactatcattatctccatttcacagataaagaagcaatctaagagagactgagctatttcccagcataagacagctggggaacttgttgaccccaggtccgcctggccccgagacctgggcactgcagtggtgctgtgccaccttttcagcttagctctacttgaggctcatcctccaacccagctgccaagatcaccaccactcaggccggcttgtccatcttcctacgtgccctgcaccatgaactctcctcagcagaaccccattgtctggctttgcagttccagtctctctttttcttcactgtttcccaaaaggcttccccttgatgctgcattaatttcagagttgagaaaagagtccaaccgccctctgattgtctctcgctcaaggcatgcacctttctcattattagcttcagtctttcaagttagagacacccctttaaacagtgtgcataggaattaccggggggagagcgaggacacattgaaaatgcagattccagggcctcgctgtccagaaggtctgattcagctggtctgaggaggtgggctcaggaaccagcctctctcggggacggctccccaggcgactccaaggagcattcagccaaggctgggagtttggcagagtgatgagggcagcacaggaactgtcattcctccttctctctcacatttttttttgagacagagtctcactgtatcacccaggctggagtgcagtggtgagatctcagctcactgcaacctccacctcctgggttcaagtgattctcatgcctcagcctctgaagtagctgggattataggcaggcaccaccatgttcagctaattttttgtatttttagtagagacagggtctcaccacgttggccaggctggccttgaactcttgacctcaagtgatctgcctgcctcagcctcccaaagtgctgggattacaggcatgagccaccatgcctagccctgtctcacatttttttttttacagccacctgataaatgtttgatttgagtaggtgcagcctggttagtgttggctacgtaacaatctctcgaggctcttgaggagaagacaaccaatcatggctgtgcggtgccctgttcaggttgctggagttgctagatgtgttccagctctgggcacacatttggagacagacagctgtggttcatttagactggatgcaggatggcaggcctagtctgatgtgtggtgtcgggtgattgaaagtgaggtcaggtgctcttgaaatgaggcggcaagggaggtgggatctgtagttgtcagaatggcccacaaagatgcccacaccctaatctctggaacctgccaataccatatgtcacatggaaaaggggactttgcggatggaccctaaaatagggaggttctccgggattatctgagtgggcccagtctaattaccagagcccgtaaaagcagagaaatttctctagccagaggcagagaaatgggacagaaggtgaagtcagagggattggaagtagagagtgtctcatggaaaacccgagaaggaatgcaggcagctgtttggagcaaagaccagccttggatgacagccagcaaggaatgggaacctcagtccaacaaccacagaaaacaaaattgagtcagagcatgaatgagcttggaagtggattttcccctagagcctccaggaaggaacacagccctgctgacaccttgactttggctttgtggaccctaagcagtggacccagtcaagccctcctggacttctgacctacagtaacagtaagacaatacatttgtgttgttttgagctgctgagtttgtggcatttttgttatggcaggcgtaaaaaactaatacagggccctatttcagaatctgggagaggacgtatgctgtgccttcttctcattgtcccctgccctcctctgaccagcccatctctcctttccaggtgggctgttgcagcctgacatcgtgatatagagcgaattcccacctgcaccttacacgctgccctcggttgctataaaaccatttcctctggtttttccatccttccctgcttgcctgctccagttaacattttggtacatttcttttcagggcttttttctgtgcattttattcccagttgagatgtgcaaaatgtaccaacttgtatcctgctttgctcccttacattaaatattttcatatcactaacgtttttccataagccttactgttaatggctgcgtaatagttcatcagatggaggtgctgtaatttagttgttcattctccaattcttggacttcaatttatttccttcccttgcatccccaattatgaataacttatttttttttttacctaaagattcccctagcattctatattaaatccttatcacagttacccagaagaagaattactagaccaaaaggcacacactttttttgcggctcttgatagaaatgctaaattacccttcagtttctgggcaccatctaagcagcttacttttgctccctaatatcttctctttgtctcctccatcgagtcctcctctgagccccaaagggctggggtggtctattagttggtagaactataggacatccagtagaatgcattgggtgttccattagtctcggcaatttatgttgtttctttatcatcctcatagactcatcacgacgtctatgacccacaaacagaaagagaagtttaggaaggcatgtgttccctcttagagattcattctgccctttagcccttgttgtagacatgagtctcagctggcaaacttcaggtgtgccccaaatcctgcattttgttgttgtcattgatttttaaaaaaatacattttaaacccactcgtgcttctctgagctgctctcccccgggctactggaagattcagcctcggtcatcacaggcgtttcctcacctggtgttgtacaaagtctcaggaggggcatctcagaaagcaataaggcatggggtggtggggggggctcttccagttatcaagcatcctctgagtgatcactctttttgtttggaagctttgctgcctctgacaaatggaattctttgccagcgacttctctgggtcttgttatctacttgattggtgggggcctgtgacgggggagggggctggagagtaccactttgcagggcagtgaagccccagaatatcttctgtctctagtgttgcagattcttttatctctctccttgcctttgaaactcatcactgtttttctgctgctggaagacatgtcacattcccgtgctatttcacctgacttattaaaggcagaaagaaactttgatttgaggcggcttctctgcctatcctgcaatagttcccagggctgggaagcagagatgggtctccatgccttcaaggaaaaagaccctggaaaatgtaggaaggaaagaaacctcacacattaatttttcaagaaaaaatattgtccctctcaataaaggctctgagaagtcctgcaaaaagcaacttgcctaacttcctttaagccagtttttctcaagcttagttattcttgaggccttgtctcttgcataacaactcatacttttctgcagagttgtagcaaacacactggaaaatactggtctggctcaatgacttgagaggttgacaaatgaggagactgataccagaaagataaaatggcttttaaagtctcttatgccatgttcattacccataatctgacccatgtatgaggcggggcttaaacgtctctcatcagagacagtgctaaagagggtgaaataaatcacacttcttttcaggcaagatgtatttttcttctgccaaaggggctcactatttgaagcagtcccatttaaattcttttcataaagcaatgaatcaaacttccccctccagggtgatccttcgtatctctggattttatatttcagctttctcatcaatcctggctgtgaaatgtcacagaggactcgaggtcatctccgaatcagggacctgaccttcccaagccttagaccccagtttctctctctgaaaacctagcagtggcctggcctcacacagaacacgtcagtctgcctggcttggaaactgctttcaagatgtgagttgttgattatgttcaagatgacagaatgtgacattaaaaaaatcctgtctaatgctagatgacgagttagtgggtgcagcgcaccagcacggcacatgtatacatatgtaactaacctgcacaatgtgcacatgtaccctaaaacttaaagtataaaaaaaaaaaaatcctgtctgagaggctccctgaggagtgaaccaaagtagaatttgagggtgttgcaagtcaaacaatgtgttaggtgtctttttttttttttaattatatttactctttaaataagtaatgcatgtccgtggaacaaaattcatacaaaaattgagacatgtcaaggctttcttctgtgttgatgtccagctatctggttaccctctgctatggatggaatgtttgtgttcctttgcaattcatgttgaaattgggaggtggggcctttgggaggtaattaggtcatgagagcttatgaatgggattagtgcctttataaatgaggcctgagagagttccctttccccttctgccatgtgaggatgcagcaaaaagacggccaaccatgaaccaggaaatgggcccttactggcgtattagtccattttcatgctgctgaaaaagtcatacctgagactgggtaatttataaagaaaaagaggtttaatggactcacagtttcacatggctggggaggcctcacgatcatggcagaaggtgaaaggcacgtcttacatggcggcagacaagacagaatgagggccaagtgcaagatatttccctgtataaaaccatcagatctcatgatacttattcactaccacgagaacagtatgggggaaaccacccccatgatttaattacctcccactgggtccctcctataacacatgggaattatgggagctacattcaagatgagatttgggtggggacacagccaaaccatatcaaccagacaccaaatctatctggcaccttgaccttggactttccactctccagagctgtgaggaataaatttcagttgtttacaagccaccccgtcaatggtagtttgttatagtagtcagaacagactaaagtgtcctccaaggaggtgacaactgttacaatcttcttgtgtccttctccggaatgcaaatatagtgaacataaaaatcagcttcctatagatgctgttctgctccttgacttttttgcttggaggttgttctatcggtttgcatagggccgacttactctttttaactgctgaagaaatttcactagagaaatgtgccatgatttatttaattgaccctccatgaatagacttttccattgttcttaatctttttacaccaggtcagcagttctcaactggagctgattttgcgccccgcctgccccaggagatgtttggcagtgcctggggagatttttgattgttatagctgggaggtggggtgctactcactagtgggtggaggccagggatgctgctggacatcctatggtgcaggggacggcccccacgagagacgattttcccaccccggatgtcagcagggctgaggctgagaagcctgcgctaggtggtgtcttcaggctgcaggctgcaggtgagaagtctggagggactgagatgtcaagtccaaaggcagggacaggaggaaatgcgcgtgccatgagaacactgcgctttgcaggaaggaggagggaaagtgctcaagctcgtgcccctcagagtctagagaagacaggtctggaaggggccaccacccagagaggggaggggctccccttattccttttgtgcccatttatgctcctagattgtgcctgggaactccagaatagtgggtaggagatgcaattatcctcaacaaaccaaacacagtcattaaacagaatctcaacgctcttaattactagtatattagcatattacgaatgaggaagcagcgtttagtatataacagcagaagctttgggaagaaatgcctatttttaccactaattaagagaatattatagaagagttagagaattaattgtacttcagtatatctttataaggaagataattgggtaaagattgtttctttcttcccacatcacaatatttgcaggcagatggtattgttcgtgctgagaaactgttgtggtatcaacacaaaccattttctccttcaaaaatatttaatacattaattggcctcctctttgcagaatattattacgattatttacatctatgctgcacttcacggttttcaaacacatccatgtgcatgaacctatggaattctcggggtggtcaggatactatcattccctttttacaggggataaaacagctaggagagacttaggtgacttgcaagaggccagaagcttaaaacggttgcaatcaggaccagaacccagcccccagcactaaaatgtctacttctggaccatggatgattcttcattttctctgtaacctgcacgatctggtacctcactgtggatgtgtgcaaagtgtttacctgctctgtgtgtgtgtatggaggggttccatattgtgtgtgtgtgtgtgtgtgtgtgtctgtgtgtgtgtgtatggggggttccatactgaagtgagaatagcaggacctatgtggtacaggagtcctgggttcaaatcccagctctggcacttactgttgtgtgactttgggcaagtgaaataatctctttcaacttcagtttcctcatccatgaaagaagggttgtgattcttatttcctggggttgctgttaggatgaaaagaaatgatgtcctcaggtgctcagtacagtgcctgcctggtacgaggtggcttatggttgttattgttactcctgcctggatctgctcactcatcagacacttctgattgtatccaggggtttcacatgtgcacacatatcagccccagccacgtgtggcttccgtggccacagtttctgatgcctcccctgagacaagcctttaagtcctgctgctctgcctgtgctggggagcaggtccttttggtcacccagccgccagcgcttcctaagctcgtggtaaccgatcggcacagcagctaaggaggggatggttcctgacttttgccatatgctttcgtggcgggctactgcagtgggctgctgggaccctgatgcggcacagtgcttggggattaggctttatacactatacccacagctgctcctcctcggggtgagcacacatggtcaaggtcacctggttaaggtggggctcagggtttagacaccaatgtatactgagaatcacgccttcctttgggatcccaggctcacacagtggcagcattaagtcatctctccttgagataaactctcccaggagcctctactgggtgatggtggttctgatctgactggtatcacttccccccttattttggtaactgagccttagtttgactttgatgagttagcagttctccgctctcagaccctgtggttcaagaaggtctgactccagacccttggtgctgacaggggatgtgtgacccatccctgacataggagaatgcatatgcatgctcctctggtcacagaaagtggtttagggatgagcatgtgacccaagtcgggcaactcacagccaatcccaggacttttgcgggcattattaaacgagagatgatctttctgctgtgggtgctcagctggtaggatgtacgcctgggactacagaggccattttgctaggacatgggggatgccctctaagaatgaagccaatgcagaggaagacagagaccagagatggtcagagacaaattcctgattgcatcatgagtacctggatccatccatgcctgaagacagattgaggttccatcatttgcaaccaaatgagccccaaggctgaccttgacactgaagctcctttcaatctcttctcctcccacccaccagaagtgctgggatttgcctgaatcctgttaatgggctgactgcaggttcttttacaggcagcccttaagaaaacagataccttcaagaagaggttggagagaaaggagaagaaaaagctctcccaattttccatgctagatctccagcctggctgagatgctgccttgtattttatcaggctcctttccccatttactttccactagacgttttcaagaggaaatgacagagattactttttcatgaggctgccttttgtaacccagcagatgtttaattaaaatttttattatctcctcaagttaacacagaaattcatctgttatggcagcacaagtccccaactttgaaacttcccttttatgagttgagaattccactattagccaaagcccagcatctttcccaagcatctctgtgtatagtgcaggtgaggatttgacagcccctcacttcagcttagatgtgacctcctttatgacgcttctcttgaaaccccgcccacctatccccatgcctgttgcctttttccttctctgctccttgcacctgtgacaccttatgctatgattcgtttacccatctctgtttctaaactcctcgaggacagcaactctattttctttatactagagtggatgggtattttggcccggtttttaattcatgaatatattcccacagctttaaacagtgcccagcacatagtacatgctcaataaatgtttattaaatgcatctctgcatcccacacatgttgcagtccttagcacagaagaaggacttgggacctgcaagaatgaagcgaggggttagatacgcccttttacttgatgtgatgattacacattgcatgcctgtatcaaagtatctcatgtaccccataaatataccttctacatacccataagaattaaaatttaagataaaaaaggataaagtaggaaggaaagttggttcccagctcccccaatatcactgctgtccaggactcaatcacggcgggttcttctgtctccttttatccaatcagacagcaactgcctctcttcacattcattcattttccagatcccccgcacacttattggtgcctatacagtgtcaggtgtagacagatgagcgtgtacggattctgcctgaaactcacctgctcttcagctctgtgccacgaggaacgtctcatcactcccattttacagatgtaggatccaagactctgaggggtaacagtcagaggtcgcctgatataagaggtgaaggttagatgaacaccgttttgctttctcctccgttgtcatatacatgcatcttacctaccggctaccgtaggaaaggcaggatagatatcctacattttgagagaaagacttggcatgaggcatccagtgcgctctcagtcaagggacagctaaaacctcattgtctgtgttgctctgccttttgccctgagagaggtaccctgtcatcttacctttatgggggacatgaatccctctgtttcctcctggttttcattctgaacctctgtgcccctagcaaacaccattagctcttcctgacttcaggatggactgagtaacggatgccagacacagggacgttcccaacactgcctagaacgaagtcacttttaacagagtgaatgcgaacacaatgtatgcatattgcacatacagaactacctgacagtgctaaataattcagagagggcgccagcagctcagtgccttttaatagtaaataattcaagggctcttggcatccctcccaccgatacagcaatatatcttcctgtgtcaggagagaagcaggagtcttacatgaatgaatgtgagggccatcacaaccagaaccttctcccccatgcaagtttacagagtgcagtgggcaacatcatttgcaattgttctttgatttaggtgtccagccggtcagacttccagcgtgctggcttttgttacatatatatattttctgagacaggagtcttgctctgtcacccaggctggtgtgcagcagtggcacaatcttggctcactgttgaacccaggagggttcaaatgattctcgtgcctcagcctcccgagtagctggactacaggtgcgcaccaccatgcctggctaatttttgtatttttagtagagatggggtttcactatgttggccaggctggtctcgaactcctgacctcaagtgatccacccacctcggcctcccaaagtgctgggattacagatgtaagccaccgcgcccagccggttacatattttttaaagtgagagaagaaaacagtttcctcagacatccactgtgattaaagacgagcaagtgtgcagttatgtacatataaatttgttagcaatttaggtcacccttggcctactgttcaaactgagtggcaggcttgagagcggagggcatcttgagtggcgtagtagcctcgcatgtgttctgtcttgttagctatgcaactctgggcaagtgatgacactttcttgttcctcagtttcctcttctgtcaagtggggtcaataatagttcctatgtcataggattgtcatgaggaccccatggaagtccacctgtgaagggtttagcacagggtggggcaggtggaaactgctccctaaatagagacccatcgctaacagtaaatcaaagtcctcattttactaatgaggccactgaggctcagagaaggacataagcccaaggtcacacagccatgactagcagcaagagggcaaaggtcaggtgctcagtttcccatttaagtgaatttatggcagaagggagtaacagcataccctggggactgggtgcagccaaaagatcctttgcagctgaaaaatcctttgggatattaagctttatcagacagagtttgaatttctcgatgttttagtgtaacataacggcaattactttcactcaacacatgtttctttagctcccactcagtgcctggcactggaaaggcagcaacgaacaagacaaggtttccactctcatggagacaaccaacaagccaaccaatgaacagaccgtttcatgtcatggtgagcgcaaaggaaacgctaacacagggtaaggggctggagagtgattggcagctccttctatggtgggtgggggtgtcaaggaaagcacctgtgaggaactgggcatgcggcgagctgggcatgtggcaagctggcacgcgggctgaaccatcagcctgtgcaagggccctggggtcaggcaagtttgatgccttacttttccttctcaaagcatggagtacttttcagggttatattagtttccccgaaaactgctgctgctgtagcagatagtcacaaatagggtggctttgcaacaacaggaatttcttctcttgcagccctgcaggccagggtctgaaattaaggcatcagcagggccgcagtccccctggaagctccgggggaggttccgttctctgcctcttccacctctggtggctgctatcactccaacctcaccacctctctgtcagtctccctctgcccgcccgccttcctccctccctccctccctccctcccttccttcctcccttccttcgttccttcctttctccctttctccccttctctctcttttttcttttcttttcttttttggatacagggtctcactctgtcacccagactggagtgcaatgatgcaatcatagctcactacagcctcgaagccctgggctcaagtgatcctaccacttcagcctcccgaggagctgggactgcaggcgtgccaccaccatgcccagttacttttttattttttgtagagatgagagtcttgcctagtctggtcttgaactcctgggctcaagtgatcctcctgcctcagctaccaaaaatgctgggattacaggcatgaaccaccatgcctggctaattttattttatttttctgagttggagcttcactcttgttgcccaggctgggtgcaatggtgtgatctcagctcactgcaacctctgcctcctggcatattcaagtgattctcctgcctcagcctcccaagtagctgggattacagggacccactaaaatacccagctaatttttgtatttttggtagagacagggtttcaccatgttggccaggctgatctcgaactcctgacctcaggtgatccacctgcctcagcctcccaaagtgctggaattacaggtgtgagccaccgtgcccagcccctggctaatttttttattttttgtagaaatgggagtctcacccaggctggtctcgaattcctggcttcaagcagtcctcccaccttgaccttccaaagtgctgggattatagggatgagttactgcacccagcctgcctgcctcactctagtaaggacacttgtcagtggatacaggacccacccagataatgcaggataagcagctccactcaaaatccttaaattaatcacatattttaccatataaggtaatatccactctttacaaggtaattttgacaggtcccagggattaggacatagacatatctttttggggccaccccactcttatggcttaggaagatgtgccaggttctggacactaaaagcaacaataaaaggcaaaacttggcctccgttttgagttgaacttgcaagcacagtatccagttatgttagacattgccgacgattttggctgtaaataaatatgtagaatgagacctaaatatgtcgctggggaccctgcagcgcaggctgaaatacggatgcccaactctgaagtccccctagcctgcactttctctggtcctgttttgatttactgaggactctgggggacactgtgctaaacataaacgttccctggggagcttgttaagtgcatgctctcaggtgcctcctgagaattctaattggacgtgtctgggggaggcccagaaatctgcattttattttattttatttattttattttttattttttattttattttaattttattttttctgagacggagtctcactctgtcgcccaggctggaatgcagtggcacgatctcagctcactgcaacctccgcctcccgggttcaagcgattcccctgcctcagcctcccaagtagctgggattacaggtgcctgccaccacgcccggctaatttttgtatttttagtagagacagggtttccccatgttggtcagactggtctcgaactcctgacctcatgtgatctgcccgccttggcctcccaaagtgctgggattagtggcgtgagccaccacgcccagccagaaatctgcattttaaacaagcacaccaggtgattctgcttcagatgcaggtggtctgagaatgacaggtggagaaatgctgatgttagggggtgggtgatgcatgtttaattactagacagtggtggtggaaaaaaattctggcctcatactccatttgaggcagacacaattgaaataactacatatacatttgcaagaagtctcaggttggccaggtgtggtgggtcacacctgtaatcccagcactttgggaggctgaggtggaggatcacttgagcccaggagttagagaccagtcagggcacatggtaaaaccccatctctacaaaaaatacaaaaattaggctgggcacggtggctcatgcctgtaatctcagtactttgggaggctgaggtgggcagatcacttgaggtcaggagttcgagaccagcctgaccaacatggtgaaaccccgtctctactaaaagtacaaaacttagctgggcatggtggtgggcacctgtaatcccagctactcgggaggctgaggcaggaaaatcacttgaacccaggaggcagaggttgcagtgagctgagattgtgttcactgtactccagcctgggcaacagagtgagactccatctcaaaaacaaaacaaaacaaaaaaaacaaacaaaaagtagccaagcatggtgacatgtgcctgtagccccagctacttgggaggctgaggtaggaggatcacttaagcctgggaggtcaaggttgcagtgagccatgattgtgccactgcactccagcctgggcaacagagtgagaccctgtctcataaacaaacaaacaaataaagctccggttgcctggaataatcttgtacaatatggagccctcaactggcgggatgaatcctatgtaggcttcataaggttggagagggctttggggaagtgacccagtgcaggcgccctgggttaggagtctgaaacgctcaggctctcatttccactctcagcttactggacctggggtcttgggcaggccactctgctctttgagcctcagcttccccctctgtgaacagggttgtccggatttgccttacccagttcacaaacatgccttgaagggtcattgtcactgtttagcagttacaaatcccaagagtgtctagacttttctcctctctgagagctgctgagtgagggtgaatgggtgtttttcaaaggctgtcacattggtggtatgctggaggggccccaagaccaccctcaggatttacggttcagtaggaagcctcaccaggcctcagcatacggtcatcctcctggctgtgacttatgatgaaaagataacaactgaaatcagcaaaggaagaggctcataggtgaaggcggaaaccaggcacaagcttccaagagtctctcccactgcatcacacaggatacctaattcccccgtcaatgagttgtgaccgcacttgtgagatgttgtccaccagggaagctcactagagacttggggcctgggatttttattggaggcagatcatgtggcaacctcagcctggcaggtaccaaaattccagactcccagaaggagctcaggtgttcatcacaaacactattctttgtataggtattttaggcacagaagccactcttaccagttaacggtgggtaggaccctcatgaaatctgagttcccagactctagccaagggtcaacctcatagggactttttcttgccttccaaaggatggtggccgggtttgctgtgttaactctgtttggcacaggtggtgcatgtaatggtcgtctctcattttttttctgacatttgggtattcaacctcccttcccatgcctggggaatctcccatattttgagacaaaaatctacctctcatgatagaagctgaaaatgtcactcgttttcccagccagctttgcagctagaggacagtcacatgatcccagtcctgccaatcagatgaagcactcagattttgaattagaagctagtaacataaagaaggtggagcctgggcaacatggcaaaaccctgtctctatagaaaacacaacgattagcccaagtgatggctcacgcctgtagtcccagctacttgggaagctgaggtgggaggattcattgagcacaggagatccaggctgcagtgagccatgattacatcactgcactccagcctgggctacaaatcaagacaattgtctcaaaaaaaaaaaaaaaaaaaaaaaaagaagttgggagcacacttgtagtgaggggttgcagcagctacattctgtttctaggggtggtggcaatggcagcagttctgctgtcagaggctggtgagcagtcctgatggtggtggtgacacctgtgcccagcacgagcttccaggaaccttccctgggccagttctgcaagatgctttgagccccacccctgagtctctggccctccgggagtctcggagtctcggtgagctccctgttcacttctttacagcctcttgtctttccttaagtcagacaggcttgggctttgtttcattttgtttgggtttaggttttgtttggttttgttaggaagataattttaagatatactcatacatgatgttaaacaaaattgagtcacggggtgaaatggtccttttttcattctctctcagactttcttcttatttaggagaaagtctctgtttgcttctagagtccttaactcctttaagccatttctagcacttgcaaatttccattttaaacaaagacagagcacgcctgaggctaggatgctatctagctagaatttgataacatggatattgcagaatgtttatttcatggttactttgtatttatggcaagtattacatagcaatggtacaatgtttccctttaaaataagatcatttaagaaaaagtcctaatccgattcctgaccctgaagtaaataacagcacaatagtgtaaggataaggcagtatcaggaacatggttcttgaatgagagaagtggggggaatgatgtggctggaactcacatttggggtctgcaaaaagtggtagcagattctcagaaagagtagacaagctccctgaaagctgagggctgtgctggggagctgggaacccctcaaccccagcatgggaagatatggtggctgccccctccaccccagcattgtatccatagcatgtggacaagagaaaccccccagggctgtcccaacttggctgcagctggaagggatggtgaacattgtccagccagcccttctcattgcagagatcccgctggggaggatctgggtttcaggaccagcctcaggccttgcagtgaatctgggcaaggtcagaccatgagctggtgggtaggggttctggatcctcccctcaagctgcactgaatggccccctgctttgcttaggtcagtgccttctcactcactctccaagctgcagccacactgactcctccctgtcccttcagcttagcaaacaccctcctgccctagggactcagcccttgctcttctcctcctgcctggaaggttctccccacccacctcccaccactgcctggctgcctggctccctctaggcacccgctcagggaagccttccctgacagccttggccaggccaccctcactggttggcacataccaccttggttcactttcttcacagcacttctcctctgcggcttgatgtttaagattcactgagtgtccgttgtctcccagtggaatgtgagctccctgagggcagggacagagcagctatacaatctgtgggacccagcgcaggatgaaaatcagggtccttgtctaaaaacagttaagagtttccagacagccacagcagagccttaaagcaagctcgggccctcttgaggcccggctgctgtgcttctgcacgtccctacggcctggcaactggcccaggccagggactttgtcttgctgaccactgtcccctgaacatcggggacacagcctgatgcatagtgggccctcaatgaatatttgttgactgaatgaatcaatgaatgaatgaactgatggcttcagttgctacttcatctgcaaaccagaaacaaaatacatgcatctaaccattgatgactgagatcaagttacccattaaggttgaaagagagagtcagacgcctaggagggccctgctgggctggctgtaagagcagctctaagggcctcaggagcctttggggcaaggccgtgaccagtggggttctgctgtaccatatcacccgcgcagcttgtgtgcagcacagagtgaaggaggtgccagaacagaagcaggaccgggagccaggaggcctccccagtggtctaataagcacagtggtggcagaggaggatgagagagatgggatgcgctgatccatgctgggaggatcacgcccaaattgcacacatgcagtggggggagattgaaagacttcagtgatgttttatgtctctagggtgataccttgtggtgtaggttccaatcatctgggtctcagaatctgtcctggtgttgtcacatgtgcacatgctccatgttccagcccttcccctagtcctttgggacagaggagatggtttatgccgagagcactgcatacccccataaaagttaagtgtatttatatataataggcaggcctagagagcccgcactgggatagttatgagaagaaatgtagcctttggaagaagcctcttagaaccactgacatggagccacggacttctactggaggaagacttgccctctctggaacccagcaggtcacagtccaagcttgcggtggctctgaggggtgagaggagatggatatttcagatccagctggggtcctcggtcattagtggcaatgtcaggcggtccagagagcatcttcccacggcagagatagctggttcttttggagattaccaacatgtgaagtgaggagaaaaacaataataccaggaaagaccttgatggaattttttatatgccaggcactgttccaaggcatttacatatactcatttgtttacttctgatagcaaccctgggaggtatgtactaatattatggctgggaaaactaaggcacagagaagctaattacttgcccaaggtcatgggccagaaggcagcagagccagagttggaactgaacatctgactccaagtccttgctcttaaccaccgctcaaggtcagggaccaagggcgccactgtctggtatcctgatggctgtggcaatataaagttgctgcaatggccaaaatgcttggaggcctttgcaggcagcctagaccttatttcatccttgaggatggacacccagaaccagcctgatggtgggatttggtgtgaatgatcacatttgattctcatgcccaccctttacagcaagggctgtgattgtccccattttacagatgaggaaacaggcacagagtggttatgcaccttgtccaaagccccacagctactaggctaccaaactaggctggactccgggactgaccaaagctgttgcagtttcttcacgtcagccactgggcttttctgtttttctgaaacctttaggctgtggggctgtctttctatggccttcaaagccagagcatccttgttccttcactaggcattgagaccagagaggttaaacactctgcctgaggtcacacagctggtgagtgggaaaaggggattcaaaaccaggctggtgcatgtccagacttcatgcttgctttccttccatgcttcgtttctaagcagtttagactgaccatggttttaaattctagggcatcttcctttttaaaatggactttctcatgggagggggagctagggaccatctatagccagcccaaaacttggactggggagtcagagaggtctgggttccatttccagatctgcctctcaccagcagcatggccacagctggtcatactcctctctcagcccccgtaagatgacaataacagccccaccccaggatgtcaagatgaaggcagatagtaacgaggctgctagaagagttcagactccacaatgtgcctgcatgttccattatctaaatcagtagaacatctctggaaggaagtgagggaaggcgaggaagaggggagggaaccattaacatggtggctattaataggccctcatcaatcttcagaacatccttctaaagtacaaagagcacaaaaagcaaatctaacccctttgcaggtggagaactgagaacctgaatgtgcaaagggaaagccttccagaacaaactgtgctcactcacatagatttctttgcttctttgttcttaatcatgatcttttaaaatttctttccaccattaaaaatgtcagaatttcaagatgacaaagttcaggacaaaccctggggaggagtggctcggctcactctgcctcccgctgtgtcctcctggctgggctccccaggactgtctgccaagatccccgcatccttgaggcggtgtgccctagcacagaacagtctctccagggctgccagcagcaatcccccgcagataacacgttctcttcctgagtcctgggctcacagaacatgtagccctcataggctcaggggttgattctggaggactctgcatctctttgcagaaatgcaaaattgaaatgtcagcctggacatcttcccagggaagtccaggtctttgcaagggatgggatacctgttggacaaatttctagctaattgattttcttaagtctagccttgcttcctagaagtttaaaatcgagtagggaggcatcctgagggggcatgtgctgtttggttttaatattgctgacaaatagtgtcatcctaaacccccagagtcctctgcctccacccaggctgttcacctgggatcccttggacctcactgatatccagcaactaaagggttaatgcctagcccagcaggggatgctgcccaaagctggagtcacagtttgttctgatttagtcaatactggcctctccctcatgacaccgatggttaaatattcagaacattactccagaggcaatgtatacagtcatgaaacaagccacagtaaaaaatgctgcagaatgtctgtcataagggctagagcaagtggcaatgacccccccaccaccccatctgatgggcagcaagctgcttctctggaagatgtccatcctctttctcaggccacctccacactgagccagtcctcttcccgtctcacctggattcttcccttagcctcctctctggcctccctgcctctaccctcacccctgagccaatccatcctccatacagcagccagaaaaacaagtttggtcacaccaaccctctgcttaaaaccaccccatggttttctgtgctcacggtcaggctaaagctcccagttccctttagagcaatctctgcaatgtgcagttatacatttgtttgttttgtttatttttggtctccatcccggaatggcaggcccaacaaagactctctagtgtttatatccagtgtctagcgcagtgtctggcacacagtaggtgctcaatagatgtttgcttagtcagagaaagaataaatgaatggatgactgagcactcaccgtgaggtctgcaagagcccagaaggagcgggatgtttcctcggcaggttataatttgcagaggcagagaagagattgccattcaaggcaaaggaacggtcagggcaaaggctgggaggtggtgtgtaggtggcttcatctgccctacagggctctgtcagcaagaagacaatacagggaagggactgagagcgtggggttctgagtcaaaggccctgggttcaagtcctggctccactattattagctgatgaccttgggaatgaggtcacctttgtttgactcagttttctcatcttacaaatgagacgatgatgatctctaccttatagaactgttttgaggactaaatgagataacataagtctgggtgaaaaaaaaaggctcaataaatgtcagtgagtgtgtttgattctgggaaagaaataacacttgccaagtattttctgtgcagggcatgtactgagccgctcatttaatccttttagcaacccggtgaggtttactttcgtatttcagtttgacagatgaatgtgacattctcccctgtcatgggtatcccagcacctggtttattgtggttgattcagtgcggtgatgtttaacccttgcctgggcattagaattacttggggagttgctgtaaaatacccacacttcccaccaccggccagccaaataaatcagaatttttggggaaaggcccaggtatcagtattttttaaaactccctagatgatcctaatagaccagccaaatggtctaagtttggatgtgaaagactgtgtggttgtcacagtgagccccaggactggggctaggacttgaggatgggggctgtgaggcacttcttactctgactactgacagcaaagccagacaagtcacttcatagaggagactcggaaatctgttaccacccagtgtgggcatgcctggagtgtggctttcaagtgctcagcaatattgcttggtggagtcttcaaatcacaagcatccctcacttttatggggctgtctgctccaggcatccaatttgtattagcgaaagctccctctccttcataggagggtgtaacaaaagggaacccaagacatatagatattttctctgtgcttgtctgggggctgactgttcccagatcttattgaaagaggccaggcatggtggcttacgtctgtaatcccagcactttgggaggctgaggcaggcggatcacctgaagttgggagttcgagaccagcctggccaacatggagaaacctcatctctacaaaaaatacaaaattagctgggcatggtggtgcatgtctgtaatcccagctacttgggaggctgaggtagcagaatcacttgaacttgggaggtggaagttgcagtgagtcgagatcatgccattgcactgcagcctggacaacaagagtgaaactctgtcttaaataaataaataaataaataaataaataaataaataaatagctagctagctttggggcctgaacctgacttctcctaaaactgttggtctgctatgttactttcaaccccttcctatagcaatttgtgaaataagtcatttctctaattaaaaaaccaaccaactaaccaacaggatgcctagttaaattagaaatgtagctacacaatgaataacattgcatgatacagtaaaaaaaaaaaattacttattgtgtacctgaaattcaaatttacctgagtgttctgcagtttatctggcaaccctacctgggtctcactttctggggctacttcagagttaatagcatggacattaacaccacagacatcctccttggaacccagctctgtcccttaagtggtaactgagctgcaggcaagacatttaacttttgaatggtaaatgcttcttttcccataagcaaatacagataataatagtacctgtttcttgtggttattgtaactgtaaaatagaatcatctatctaaagtacatactaagtgctcgataaatggtaactgttattatatttactgtatcaggaaacaatatcagcaatgtatttttggtttataatgataagaattataaattccttttattctgtctataagaagaatgtatgtatattatggaaaattagaaaatgcagatagatacgagaaagaaagaaaatctactcacatttttaacgtttgctgattactcttccagtatttttccttaaaaatatatctgtatctggccaggcatggtggctcatgcctgtaattccagcactttgacaggcagaggcaggcagatcacctgaggtcaggagtttgataccagcctgatcaacatggaggaaccccatctctactaaaaatacaaaattggctgggcgttgtggcacatggctgtaatcccagctactcaggaggctcaggcaggagaatcgcttgaacctgggaggcagaggttgtggtgagccaagatcgcgccattgcactctagcctgggcaacaagagtgaaactccgtctcaaaaaaaaaaaaacaatctatatctatatctatgtatctatctatctctgtacagaatagttttgtgctgtgggtcctgctttttttttttttcacttaacattatatgacatttgaactttgaacaacatgggtttgaagtgcgcgggtccacttatagaaggagttttttcagtacaagtgacacccagcgtgcctgccttgcctgctttcccttccacctcctccccatcttctgcctctgccacccccaagacagcaagaccaacctctcccttttctcctccttgtcagcctgttcgacatgaaaagaggataaagatctttatagtgatccacttccctttgatgaatagtaaatatattttctcttcctcatgattttcttaataacagtttcttttctctaacttactttattgtaagaatatagcatataacacacacaacatacaaaaatatgtattactcggctattagtaaggtgttagtcagtattaggctattagttaatgttttggggaagtccagagttctgtgaaaatttttgactgcgtggggatcagtgtctctgactcctgcatggttcaagtgtcaactgaataagtatttctctaagttgttagatattctttgaaaatctaattttcactgtagagatatagacaaatgtatttagccaatcttatgctgatcatccaagtttttgttgctattataaatagtactgcaatgagctctttatcttttattaaacattgcgctagagctcagtcggcccctctgaagcctgtctcaaagcatggtcttctggtttgtgtttctggctgcctggccgctgcttttgccagagtgccttgccaaaacccaagacaaatggatttcagccttgatgggtaggcccagggctgctcagaggcccattttgtcactctctgtcttttggaagtggagctggctctctgctgaaatgtacaaacacagaatcctttttgatcaaggggagatccttttctagccttgggactcagtccgttctgttcctggctgcatgcgtgccatctccgttgattgtcgttgtctttcttgtttcatggaactggaaaaacaaaaccaaaccaaaaaccttccaaggttctgaagtcctcatatccttaaaaatccatcagaaagccccgaagcttccgctgctgagtttgccttttccagccttgcctgatctcacttgggaacatgactacccaataactcagttgcagcaatggtgggagaacagagccaccaaatacaagcaacgtcctggagagaagggcgcttacaggcagaggcgaggcacactgaagcaatcagtcctgctgtacaggttttcttaatgttttgacattttaagttcagagaacatagcttggttttataaaatagtttcagtccagaggacagagggcacaaaagtctccaaacaagttcttctgggtggaagacactatgagtggctctttacctgctttgccatcatttttgccccagaaccttatggaatatattaagtcactgcatgggtccacttatacaaggatatttttcaacacaagttacactcagtgtgcctgcctcacctgccttccttccacctcctctgcctctgccactgctcagacagcaggaccaacccttcccttttctcctcctagtcagcctgttcaacatgaagagagggtgaagatctttttaacgatccacttccatttgatgaatagtaaatatattttctcttccttgcaattttcttaagtttcttccctagcttttcttcctgccattacttttgcaccaacctaatatccagtgcagatttgaggcaatgaattgatttaattgcagggctcatttgagcccctagcatgtctttgtgtatgcacaattattttttctaaactggttgagtttgaaaatgtaataactttgcccagacccacacagccattttcttcccagagaatcaatgtaatttgcatgtgttattcggccacaggacaatagagcagtgcagctcttgttgattttgaagagctgctgatcgccttgtttgagaagtcagggcccaggaaggcagccaggatgatgcagggcttgtcaatttccaggtgaattcagcaggcaagtgggagcggcaggtgctggtcagcttgggtttcaacctcatccttcatacgtgccagctttgagactttggcaagttacttcagctttctgtgccttattttcctcatctgtaaaatgggataataaacgactctacctcatagaattcttttgactcataaatgaattattacgcgttaagcactccaaatactgcctagttcattgttagtattatttattaagctccaagtggtatttggacttcttaaatgagaatcaccaaaagcagggcttctcaaactttaatgtgcacataaaacacctagagatctcctttaagtacacattccgatttaataggttgaagggcaggcctgggagtttgcattggcaggtgcagcgactatcggaggtgatagccaagatgctgtttgaagaccatgctttgaggttcaaggactttgagaacttagggtaaaattgcagattcccaggcccaagcccagactgtcggtttcaggacctctaagggttggtcccaggatccaagtgtttaacgagcctcctaggtgattcaaacacactgaagcttgacaggctagaatgagttaattttagtgtaaggaagatgtggcttgttcataacctttgtgggagagaatgtgtcactctgtgtttaggacttaggtttcttcttctctcctttcattttccttcttctctttcttcattcctcccaggccaggcagcacagctcagtggttagagcatctcctctggatttgcctcgcgatctcaccattagcagtgatacctttatggaagcatgtgctatgagaggactgtgaaagggaacccaagggttgatttgggaagctggcagtcatcggccaaatcctgaccatcttgggctgactgctgcagagggtgcaggtcagagtgtatcatcatatatgttctggccactggctttggacagtagtatatgtgggtgtttgttctcctctggatgataaacagctcaacaacagtgcccttttttgctcttcttgggccttccccagcgcaagacttgacatctgagctcatcagtgcttcctgaatgagtgaataaaagacgtgctgcagccactgagtcatgcaccactgagctattgcaagctgaaaggaactcagcggttcataaacactggctttgaccaccttagctcaattcaagtcagcaaatattagtgatcatgtatcttgcatcagggcccatacccgaagccacagaaagtcctgggggcagccagatccaataattataatttctctgtaagttttcctatgcctcgcttatatttgaagcatgattacaatggaatccaactggccatacaatcagtatttgtaaaataaaaacgaaatcagctctacatgctgtcatttccaagatgatgttaatggaggtactcttgttttaccttcacaaccacattaggaggtaggtattcttattgtccacattttactgatgagcaaactgaggctctgagaagataactcatctggcacctggcagtggggaacttgaaccggggtctggaactccgcctgttccataggctggtggtagggcataggaagcgggtcgtggatggacttgggcaagaagaatagaggtgcagttcccctgagaaagggggagggatgctggtcatcgggacacagctgaggttgccacgccacatcccctcctccaggcatgcacagcattgtgggagggggctggcctgtcacaccctcaacactgagacccatcaatgagaagaatttcctgagtttataaaacagcaacaggttaggcagcatcatgagtgaattgatcaccaagctgaatcttacttaactcctagctttaaaataatcggcaggaaggagaacaaaaagccacacgtgtgtttacacacaggcaccccgccctgcaggccccaaggagaggttcaaatcaaggcagcctttcctgtgggcgtgggtgaggtgccccgcacaggagccagctttgcacttagtgcagactagacagccatgtagtttagcaggggcagcattgacagaaaccagagagctgtaaatgccacactggggtggctgggccacatgtgctattaaccagacagtcttgttccatgtctggagtctgagcacattttaggccctggtggctgggcagcaccctgtggggaccgttaaccacttagctgagacccgttgagcagatgcctctgaaatctatgctggtttgaaccccccctggggtattttgtgctcttagggacaccatagtaattgatgtaatatgcctaagatggactgaaactgtctgatattggaataaatttagcctcactggtaataaaagataagtgcatgaaaacaagatgtcattttactataattttccctggccattttattataatttttagattggccaaggttaagaaagatgacagctctgtgggctagagggtggagagacaagccctctcctacactggtgaggggtgccaggattctgtagcaacacctttgagtgagcataaccttggactcaaacaattttccttacaggcaataacctacgaaatactgggatatacgcacaaagatccatgtgccaggatatgtgttggaggatttatatttggagaaaattaaatgcgcaatgagaggtgagtagttaaatatattttggtatatccatagaatgaaattccaggcagtcataaaatgatgctggcttttatgttatggaaggatgttccagatatataattgagtagaaaatataggttacaaaataatatgtatagtatgagctcatttttgtaaaaaaaaaaaaaacccaaactgtctatatctagatgtgaaaaatgcatggaaatattaacaatagttatctttgggtgatggggttatggatgaatcctgtgctttctaacatttgtaaaagggaaagtgattacttgaataacacaaatggactgtctttagaggcgagggaccaggctagtaaggcctgcaagagggtggcatggcagctgaaaggagggtgctggggttactgtgggcctcggtgtagcttctgctcagacaggaattgtctgtggggctctgggcaggtggtgcaagctctctgaaccttggtgtcctcatctgaagaagggggtcggatgatacttacttcacagttgtgttgtgaggattaagtgggataatttctgtaaagtacttggcacatgataagcacctaataaatcttaattatatataaatattctatcaatattgaatgctagcactatctacctctctaaacacacacacacacacgttaatccacatatctaaaagagtggactggttttcctttcctttttaaaaaaatttttagaaaccgatgtttattttctgtcaaccttatttccatgttgtttaagagcctgtgcaagaacagtgtaaggccattcagtggttggtcctacccattcggtggcctgagcagggggagctgcagaccagtcttccgtggcaggctgagcactccagtcttgggtagggaactgctgaataggcccagagggcacctgcacactgtcagaccagtctgcaacctcaggccaagtagcagtgaactcaggagctggagcagtgttcattcaccctgaaattcctccttggtcaaagccttgtcagcagcagcctgctcttctttttcaatctcttcaggatcgctgtagaagtagagatcaggcatgacctcccaccagtgtttgcgggcaattgtgccgctgcatgggcagaatttcccgggccagcatccacatcaagtccactgagtgagcttcctgttgcatgggatggcaatgtccacatggtgcagaggagaatctgtgtgacacagagcaatggtaggtaggttataacataagatgcctctgcgagaggctggtggccggtcctgcaatcagtaaccacaagaacccgtggattcgggaatgttgcctggatctggttagtgaaggttccaggagtgaagtggccagcaataggagtggctccagtggcagcagcacacttcagcatggccctctggccagtgctactggaggatatgacactgacatcagcagggttttcaatggcaacgatggcaggagccaccagcagaagcttctcccagctcctctttagatttatgatgtagatgccaccacttttcctcttacagatgtgctgttccattcggaagtcaaggtcggtgccacctaagtgggttcctgctgcaaggaacttaaggacatcctcctctttcatttgcaggacatcaagggctgtggacattgtgaaagtttccctttaagttatgacgggaatccagaaccacactgtatggacccctctgtgggtagcagggaaagcgagtagacttgttttctaaaactcccgaggatggactccttgggacagcatcacagcatcacaggggaccaatgtccaccccaaattaagaaaaatcttctagctttccacaggtaaaaatgggagccccatccctggaagtattccagtagcttgtgggtaaacagatggcagaggtatgggaggtgatatctgagagtcagatgattgggttgacctagccagtggcatccccttcagtccccacattgaagccattggcaaaggggatgagaagctggctcaggatcaggcaacctggggccttgcagcagctctgccgctttcctagcaggtgggatgctggcagacctctctcctctcagtcccagtattcacagggctaaaataatttctgctgtacagttgtaagaattggaaataatgcaatctagctcccactctattagtgtttttgttctgaaaatagcagagctaggacttgagcaaatattcctccattcattcatctgtgcctgcattcattcactagacaaatatctatggagcagcgtgcccagcttctgtaacaggcagggcccctggaaggctcccaagccccacagacctgctgtcgagggtctgcagaatcctaatcccactgtcaggctttattgtcgtgttctgcacaggcaccaaagggcagtgctcagtgatgatgaagctaggctccttgccagaaagacagcaggaagttttgctgcaacgtgcatgcttccttgaacacaaggagggaaataagaaaacccccatggccagtttcatgatggggggagttattccggccatgctaagataatgtgccgggataaagggcatctcagctctccctgcctcttccctcctccccctccaattcccgagctgtgaaggtggcaggaggaagagagcttgaaaccacggggacccggcttgggagggactgttccttctggactttctgcctccctaagtctacttctatctcagctccagctcagcttcaggtctctgtcacagatgtccccaaccttggcccattttccccatccagcaaacacagtcacactttgaccggggtcttacccctgcgttatgactgtgtgcaggtgtcagcttggcctccgccacacccagggtcctgttcaaattggggtgtgtggaaagacagtagcagtgctggggaccttagaactttggtttcacagtcttttgcctgttttataatgtgcgggatagactggaaaagtggtatccacagccgggcacagtggctctcgcctgtaattctagcactttgggaggctgaggcaagtggagcacttgaggtcaagagttcaagaccagctggccaacatggtgaaaccccatctctagtaaaaatacaaaaattagctaggcctggtggcagacacctgtaatcccagctagctacttgggaggctgaggcaggagaatcgcttgaacccaagaggcggaggttgcagtgagccgagatcgtgccattgcactccagcctgggcttcagagagagactctgtgtcaagaaaaaaaaggtggtattcacatgcaatttataaataaatacatatataattaataattcaattattaattaggaataaaaaggaatgatcattgcttctgagctgctcctggttcatcacaccaggggcagctcaggagctatggtcatttcttcctttttattcctaattaataaatactatgttgttaattataataacagatgttatattttataattatattttatatcttgtaataaaatatattattatgtgtaattatgactatatggctgggtgcagtggctcacacctgtaatcccagcattttgggaggctgaggtggggtcactttgaggtcaggaattcaagaccagcttggccaagatagtgaaaccccatctctactaaaaatacaaaaattagctgggtgtggtggtagatccctgtaattccagctactcaggagactgaggcaggagaattgcttgaacccaggaggcagaggttgcagtaagccaagatcatgccactgcactccagcctgggagacagactgagactctgtctccaaaaaaaaggaaaaagttatgactatataataacataattattattatataataccataataataaataataatgaatacatattaataattgatacatattaaaggtgagtgtttagcagtttttaaagttaggaatgcatgatcaaagaattcagagccaaccatcaaagaccaggagcaatggctatttattccttgtctcagggttctctgagcagagcttgctcctggctggggttcttaagtgtttgtgaaatgaatgaatcaagaaatcggactcctagtcttttggcaggctggaagcaacttgaaagttcatatgtgttgtgtcaactgaaaaaaaaatcacaaatttataaatttagaagggagactatttcttataaaggattatagcctggaaggtggccattctgccagaatgggaagcatcgcctctggaggaggccgttagtaggcactttgagggagggaaagatgagacaggaattcatgaatgggttggccaagtagatatattcaatgggttacaggaggagctatgaatattcatgaaaggggttctgatgtatgcaggaacaaacgtgtgttacgtgtggcctgtgttctctttgggaaggagacattgtttaaatgcattctagttaggctctataggtcaaaaggtgaagcagggccgtgaaggcactcagtgtgcagcctctataaactggccagaacctgtttacggctgtcagtctcttatcaggaggaagttaatgaaatcagtttctgtcccattaaagctgaagatgtggcttgtggaacagggggcagttagtcagcataaggcgtaagttgcaattgtttagtgttgctgatcttgaggtcagtgcttgtttagatgctagagaaaaagagaaaccttgtggtcgttacctgacaacagtagtttctttaaggatggggatgtgtgacttaacccttgtttggcatggccttagatcctgtttaaaatttggtatcttattgccacaaagagtccattctatcagtcttatgatctctatgttcacattagtgttggtcagttattgtgtctgagccacaaaagggaaggggtttataacagggtgagtctgacctcctgtcccgtgttggcccagaactcagtttttatggtttctctgaggttctcttggccaagagggggtccattcagttggttggggggcttaggattttatttttagttctcagttgagatggaataatacatcttacctcaattcaaaaaacaacgatcagtggtcattgtctgtgggctatgttccacatctgaggattaggggttcagaagccatgtgtcccttccttctaggagctcgtggtatagcagggacgggaagacaatgtacacacatgactctaacagttaaaagtcacagacaagggaatgtactcgaattctcttttatttattttttaaatttatttattttattaaaaaaaatttttttgagacagagtctcactctgtatgtagcccaagctggagtgcagtggtgccatctcggctcactgtaacctctgcctccagggctcaagcaattctcctgcctcagcctctcgagtaactgggattacaggtgtccaccatcacgcctggctaattgtttgtattttagtagagacagggtttcaccatgttgcccagggtggtctcaaactcctgagctcaggcgatctgcctgccttggcctcttaaagggctgagaggacaggtgtgaaccaccgcacctgggctaattctccttttatatgaagactctgtctgatcattaatatttatttctcaaccttgtatagtgaaggtaaggaactggcaaagtatttctgaacctttggtcatttgagtgttccatttataatttttgccctatttgcataagattatttgcattcaaatgatatttccctttaaattgactttttacctaaataagtttaggtaaaaaggaaattatattatcaccatggttgaaaaatcagtattgcttgctctaaagagaaagtaaaagtaaaaataaacaataacaagagctaatatcgatttaacactgcatccatgtaatgttctaagcactcacttcatgctcataacaacctgctgaggcaggtgctgttattattcccactttacagaggggaaggctgaagctcaaagaagcaaggcaactctcaggggtcacagaagtgataaactgaggagttggaattccagagtccaagctggtgacgagcaccgtgaactcctcttctctggccaccactctactctacaacaaagtctataaattatggccatggccagatccagctcgccacctgtttctctgctgttcccaaggtaagaaagatgttttcatttttaaatggttgggaagaaaatcaaaggaagaataatatttcatgatatgtgaagaatacttcaaatttcagtacccataaataaaggtgtattgcaacacaaccacactcatactttatgacattttgtctataaactttatgactttttgtctataaactttatgactttttatctatggctgcctttgcctttaattgtgacagagaccacgcggcatacagagtctgaaatagtctctctctggccctttgcaggaagtatttgctgactcctgatctataaggaaaattctagccgggcagtgtggccactgacctaaggcctattgtttcaaaaggaagtgttaaagaactagtaacaccaaacagagactccttcattgatgtaatgggaaagatgaattgaaaagggaatatctttctcaataggtggatttaaagattttgttactaattgctgggctcttgtactcttagaaacatctcatggtgggctgggcgtggtggctcgtgcctataatcccagcactttaggaggctgaggctgtaggatcacttgagtcctggagctcgagaccagcctgggcaatatagcgagaactcgtctctactaaaaactgaaaagttagctgagcatggtggtgtgtgcctataatctcggctactcgggaggctgaggcaagatgatcacttgaggacaggaggtcaaggctgcagtaagttatgattgcaccaccaccactgcactccagcctcggcaacagagcaaaatattgtttctttggggttttttttttttgagacagagtctcgctctgttgccaggctggagtgcagtggcgccatctcggctcactgcaatctccgactccctggttctagcaattctcatgcctcagcctcctgagtagctgggattacaggcacgtgccactacgtccggctaatttttgtatttttagtagagacggggtttcaccatgttggccaggttggtctcgatctcctgaccttgtgatccgcccacctcggcctcccaaagtgctgggattacaggcgtgagccaccgtgcttggccgtgttttataaaaaaaaaaaaaaaaaaacaaaaaaaatcttatggttcttgttttatggaatcttagttgctctaggtaacctctaaaaactgttccagctcaaactgtctatattcctgagagctgggtcattatttcttccagcacagtaagatactgtgaatgaagtagttcaagggcctggctaaaaccttctccatcctgcctagtgctaaagggtctattttctttcctggcttcatttaaactgtgagtttcagattttactcttcaatgtggccaggaaatagcgcctttggtgcaacaagttgaatctgcccagctgtggcatgtattgaaatgcatcttcattactgaaaatctaatttgtttctcaaaatcttcgctggaaatattgaactggagcagagaattaaattagctcaaattcaaatgtggtttgctgtcattcgagcaaaattggtctctctcctgaatttctacaacttcctgtccattattttggtggactttcctgaggaaagtggtaatttgctgaaatcaaaacataataaaaatggcccccattttctaggatcttaagcaggtggaactgactttattcaaatcccagaggaaagatgagacacagacttccgttctctgagctggccactgtgttggacaggggacactatcaggagttatactgttttcttacaacagttttttttttctttattgttttctttcctcttcctcctttctttttcttctttcttctgcttcttctccaagaaagtgtctggccgggcgcagtggctcacgcctgtaatcccagcactttgggaggctgaggcgggcggatcacgaggtcaggagattgagaccatcctggctaacatggtgaaaccccgtctctactaaaaatacaaaaaattagccgggcgtggtggtgggcacctgtagtcccagctacttgggaggctgaagcagaagaatggcatgaacccgggaggtggagcttgcagtgagccgagattgtgccactgcactccagcctaggcaacagagccagactctgtctcaaaaaaaaaaaaaaaaaaaaaaaaaaaaaaaaaaaaaaaagcgtctggctctgtcacccaggctagctggagtgcagtggcatgaccacagctcactgcagctgtgatcctcctgcttcagcctcccaagtagctgggaccacaggcacacatcgccatgcccagctaattgttaattttttgtagagacaggatctcactacattgcccaggtttgtcctgaactcctgggctcaagcaatcttcctgccttggcctcccgaagttctgggattttgaatgtgagccactgtgcctgtcctcctccttgtcttttaaacaagcacaaatcgaacttaacatctgtgctgcctgtttctcctcacatgtcccccaaggccctgaaaagttggcctgcccatctctctagccacagaaaagtttagcaacttgcttaaggtcactcagtaggacatgtgagaagctggaatttgaatacaggtttagctgactcctgagcctgggctctggggacgttagagcccctggatcactaatgtgagcatggacagggcagggcttgcatgctcacaggcgtttgcagtaggtgaccttatcctcgcagaggagatgaccaggggacaggatgaggcactgatggcatctgctgcaggggctgtgtttcccctccttctaaccttccaggggctccctatcaccttctgggcaaagtctgaacttctgagcgtggactttccttcagaaagtcttcctctctactctctgcaggggtttgtacttttttttgtttttttgtttttttgttttgagatggggtctcactctgttacccaggctggagtgcagtggcacgatctcagctcactgcaatctccgcctccctggttcaagcaattctcctgcctcagcctcctgagcagctgggattacaggcccatgccaccacgcccggctaatttttgtattgttagtggagacggggtttcaccatgttggccaggctggtctcaaattcctgacctccgatgatctgcctgcctcggcctcccaaagtgctgggattacaggcatgagccatgttttcttaaagggcctgaaagaaattttcaccttagctggctacctacagtttctgttgcgacttaccccacgattcagctctacccttgcagcaggaaagcagcccgaggcaataagtaaatggaatgaatatggcagtgctctaaaaaatgtatttacgaaaaaatgagcattggccggatttggctcagagcctagagtttgctgattcttttacggtagatgggaattggacaggtaagtaggaatgggagtattatgaggatgttgctaataataattataaataattatcatcaaacaaaataacttaaacatgccctggggaatagggagagcccacctgatctctaattacacaacacacgcagacgagatccaaattcatttcctgagtattgtgttttctctccaaaaatctcaaagcagcatttgtactagacgaaatttaatttgaaccacaaagagatctatgcttatacaactaactgcctggtttagcccacggttaattgaaatcattggagaattgtttgaaagtggattttgttctcctccaatctggggcccagaccctattcttgtcattgtaatcaagtcctatggttctattgcttcggagagcatctgtcagtaactgagtggatatttaattccatttgccatttggggtaattttcttgagagctgagatcagccattctatcaccaagggtaattgtctttaattaaaggtctcagtaaaaataggttagcctgccatccagaaaacctctttgcttttctttattgaaagtatcccaaatgtgaatagaaatatttggttttttccttgcctttagtacctgcttcaaaataatactctcctttctagagcagattttggaatgggatagatccaggtttaaattcaaatttagttatttacctattatttgggtgacttgaggacaatccgttttaacccctcaaagttttaggttccttacccacaaaatgggaatgctggtgcctaactccttctcacttactccatctccccacctccataataaagataatcacaaacatttacagaatgcgcctatgtggcaggcaccttggagaaaatgttacagttatcattttgttcaattaccacacaacactacaaggatgacattattattatctccattttaaagatgggaaaactgacacacagaaaggcaaaggaccccattaaagtcacacggcgagtgaatgtcaaagccaggacctgcagaggctatggtgggggagagcacttggaggagatgggaaggaatcgttgcagggacaggtctcaccctcactagtgctcactccattacttgccgaatacactgggagaaacacgccccttctcttgacccggctcttttccacaaggtgagcttctggctcctcagccaattgatatttctctgttttgttcacttccatgtggccgacatggtgagactgggcctgtgtgtgcctcatgcttgggaggtgcctcctaaaccttggaagtccctacaggatcaggggagggctcagacagaaggaaaatagggcatgggctgctctagactttataggaaaagcaaaggtgttctcaagggtcccacggcatatcagttaggatatgtttagctgcaagttacaatgtaatgaactaacagtgacctaagcaatcagtaaaggagtttggaggtgggttactccagggttggcttggtggcttcactgtgtcaccaaggaccaaagctctttctgtccctcgggcccaccctgctgaatctgttgacttttcatccttaggtttgtgccttggtcacagaatggctgccacagctccgagcatcccatccttaaacaacctcattcaaggcagaatataggagaaggtctcctccctattgctacttttatcagggagtgcaaaccttccaaggaacaaaaacctcaccacatctcctcttaatgtctccttgttcagaacagggccataaatcttaaaccaatcaaaccaagctaaggggagtaaaatgactatgctggggaccatctagtgtcattcttttgggttgggttggggaggggctcaccttccctgtacatgatgggcccaggacaaaattgaggccctgtaatcttaagcaagaagaggagggaccacatgttgagtgggtaggaaccacctctgccaccaagagggccatggtgataagcagattagaagcagatcagtcagtttcctcctcttgcatggacctaaaataagatgccctgactccctggattagaccccacccagggaaagagactgaagtcccaacttatagctgagtcctctaggctacatatacttcagctgactgtgcctcagtttctcacctgtaaaactgggatgacatagtacctgcctcatagagttgctgcaaggattaaataagttaacccacttacaatgcttagagctgtgcttagcaggagatgcatacagtatgaatattgtccactatgtttatcggggccaggttggcatccaagataactgaccgtctcagttcatctgggaccgagagggctcccaggacatgagactttcagtgttaaggccagaaccacctggggccaacccaagatgagttggttactccatgggaaacacacatgagcaaagcaggggtagggattgaggcaaactgcagagcctgtgccccagtcatttggttccatctggttgttgccatattgtcggcccagtgtgttcagatctgatttttccaggagaagcctgacagctggatttttatgttaaatctctgaatttttacatatttttaacattaaaaagcaaaacaacaaaacactgcgtgatccaaacaaaacacttatgccgaccagtgtgggccctcgggctgccattttacaactttttcctcactcttctcagcccctctcacttacataatggatgggatgtttcttggtttggatacatacattatttcctgccttcccagagtggctccctaattcaatcttatttgtttctgcaggaagtacgggacggaaattaaagaagaaagtggttccacaggtttggtggctacaaaaagatttcctcgataaacactgcccacagtcactcatttgtgaaagctgcatgatgtgaaattaaactcgggcagaggtgctgtgggtgatgatgtctcggtggcttggggaaatgaaagccattcatctcaggcaaatgtgacaggcaggaccattggctttccgtcacctatgggctgccttctcatggcagtggcctatgcaggccttacgtttttgcagcaaatttgtaatgaaccaatcagtggccttcatgtcaggcaatctaggaaggttttggaagtgggactacttgccccactgttggtgagtattagatatccctttaggaaggttcaagagcccatgctggccaggcgcggtggctcatgcctgtaatcccagcactttgggaggtcgaggtgggcagatcacttgaggttaggaattcaagaccagcctggacaacacagcaagaccccatctctactaaaaatacaaaaattagctggatatggtggtgggcgtctgtagtcccagctacatgggaggttgaggcaggagaatctcttgaaccggggaggtggaggttccagtagagccaagattgcaccactgcatgccagcctggcagcagagtgagactgtgtctcacaacacacacacacacacacagagagaaagagagagagagagagagagagagagagagagagagagagagagagagagaaacagagcccatagaaaacgtcttgtgaatgcttaaacgcacctggctccttttacaaacttctttccacttctcttgagtcccatgtgaaagttttcactgcccccaccggctcctcaccttctccttcagagtctcacatgcatctctttcagtctcaagaggtgctagaaaaaatgctggattccttaaaggagtgtttatgttggaaaccagcatcactaggaaatggctggtcctgaccccaagcaacttatctctggcggaggtcggagaggctggtacccgtctgctcccgactgaccctcattccttcctggttgggtggtaggaactaacaggccaggccccttggtgtgggtttctggcttcctaggttccctgaggtcacatcttttgttctcatcatcatctgtctgttcccagtgaaggagaactgcttcaggacactgtttctcaaatttcacttctttgcacacaaccttcatggtttttgctccagctatgtacaattaaagctactattaacttaatatttttgttgacataaaagtttacttaaacttatgtcactaaggtaaatggaaagccaatataatgttctataaatagactttacaagtaaagagaaatacagtgaatcatgttattgtctgctagctgatacttgtgcctaagaaggctcttaacccgagaactgcccgtcttttgttaaaaaggaagatggacatgtgttggagaagggttaaggacctcctagcaccatcctgagcctttctccttgatttaattgaatggactgaatgaggatagaaaaagagtcacttactctgggattcaatgctgtttcaagcggtggcccctctaccatccaaagtcacttggggtcacacgctttgggagacaccattccagtagatattgtatcttcaggcccagcttgttctggcctggagatcctctataaggggtccccaaattgggccacccttgaactaggaattccaggtcttgggcaattattagtgctggagccattgttgcttagtgcatattttcccagtagacattggccttagagttaaattaaaactccaggatgggatctagaaatgagctcatatcagtcttctcccagggggtcttatgagtgttaaagtctgtgggacctttcatccccaccttagcttcttgtcagccccacacggactttgaaggaagaggatggtcttcccaacccccacagcatcctccgtggacacagcaagcaactctgcagggtgtgcattcacttaacacatattaagtgtgtgccaggtgccagacattgtgacagctatggcagggccgggggcaggggtcctagaaagaggaggagagcatggatgcaaagcccaacccagactttgaggcgattgttttttaaggctgtttttagcacttgaaggtacatgtctacctccaaaaacttttcataaacaaatgggaaggttttgctttcggcaatggcagctaacttgttttggacaaatcttcctgctgagaacaactagaaaacctgggcgtaaaaaacaaaatctgatcaaaggctttggaaagctaccaaaggcaaccaggattcaaggggccaagatcccagaaagaaaagaaaccgttaacgctgagtctgatatttcaaaccacttttccccctaaggcattcattgatttgaaggcagatttatggagctagggcaaaaaatacgggcattcagagacagccacagaaggagggccctggtaaacaccctaggattgatttaggaccccggagagctgctccttagcagtaagggagagctagaaacagaccgtccttcagaaggactgaagctcggctctgagccattaaaatccatgattgaatcaggttcatcttttcctaacctaactgcctgttagaagcaaaatataccctctttggaaagagactggaagttttttccatccctcctcatattttactgctctgtattttattccagccactgttgccgcaactaattttgtgcagctgtaactcaacatcacctgcctcagcctttgctatctctaacttcccatgtcagggctactctgacgcctctgtccatgggaatctacctttccatcacgcacatgcatcctggaagtgaaatggaattaaccacccataagcaacccttgaccaatggggaatgtgagctggggaataaatgcttctttcttccattctttaggcaggacattttgagacgcaattagatttttgttgttgttgtttacgaggtcttagcttggatcaacccccagttacccccagtaatgaccgattcaagagtgtactcatgaattggctttctctctttccctgtcacattcttctcagaatcccactcctgtgtgcttggattactaacaaaattaacctgcacacaaatcaaggtctcaggttctcctttctggaggaatccaggctaagactaatacaatatagggggttaaaatattctacacttttaatctacaaggtctagcacacaattacaaaaatgctgggaagacaaaaaggcaagattagaacaaaaaccaagaaaaaatacagtcaacagaaatagaactacagggaattcagatattggcattatttgacagggactttaaaataataattattaaaacactcaaagcactaggtgacaggatgaggaattttggcagggaataacaaactgtaggagagaatcaaataaaatttctactgagaaatgcttgaaaatgagagctcagtggatgtgtttttgatagtagattagatgcagctgaaaagaaaattagtaatctgaaaaataaattagaagaacatatgtaaatgaagcaaagaaagataaaaggtggaaaatgaaagaacatgagacacataataagatgcaacagtctaaaacatggaattggaatcacagaggagagagagaatatggaagaaatacgattaaagatatttgatgagaattattcaaaaatgataaaagacattcatccatatattaaagaagctataagaaccttatgcagtaaatacaaagaaaatcatccctagtcatatcatagtcaaactgcttaaagctaaagacaaagagaaaaccttataaagcatccagagagaagatatgttactttcaaagaaacaaagataacagctaaaaataatggaagccaaaaggcaataaaatgatagcttcaaagtgcaggaaaaaaaaactatcaacctagattctctatccagaatactacttttaaaaattaaggaaaaatggagacattctttgacaaaagccaagataatttctcaccagaagattaatgctaaagaagataataagtagtattctccaggtagaagaaaagtgatccttcatggcaatttaggaattcaggatgaaataaagaacaatgtagaggataaataataaatggatagatctaaatgaatactgattgcataaattaatatgtttatctttttatatgatagggtttgtaatgataataggtttattattgtggtaacatgtttataattattacattaagataatatacagttgactcttaaacaacactggggttagtggtggtgacctgctgcacagttaaaaatccatgtataactttttattgatttatttttaattacaattttttaaatttaagagataggttttgctatgttgcccaggctggtctcaaactcatgggctcaagtgatcaacccacctcagcctccaaaactgctgggattacaggtatgagctactgcacctggccaaaaatccatgtataacttttgactcctcaaaaacttaactactaatagcctattgctgatcagaagccttactgaaaacacaaatagttagttaacacatattttataagttacatggattgtatgccatattcttataataaagtaagctagggaacctgcacattgtgcacatgtaccctaaaacttaaagtataataataataaaattaaaaaaaatcataaggaagagaaaatatatttactatttgttaagtggtgtgtggatcatcataaaggtcttcatccttgccgtcttcatactgagtaggctgaggagcaagaggaagaggaggggttggtcttggctgtctcagtggtggcagaagtgaaaggaaatctatgtgtaagtagacctatgcagttcaaacccacgttgttcaagggtcaactatacatagaattgaaacacatgacaataaaaacatttaaattaggaggtagtaagtggagttaaagtgttccaaggaccttttgttttctgacaaatggtaaaagcacacacacacacgcacatatatatgcatatgtgcgtgtgtgtgtgtgtgtgtgtgtgtagatggaaacttagggattcagaatgaaataaatgtgtgtaggggtgtgtgtgtgtttatgtgtgtgtgtgtgtgtgtgtgtgtgtgtgtgtgtgtatactattttttgagatagggtcttgctctgttgcccaggctggagtgcagtggcacaaatatggctcgctgcagcctcggcctcttgggctcaagcagtgcttcttccaactcagcctcctaagtagctgggaccacagatgcatgccaccacatccagcaaattttaaaattttttcgtagagacaggatctcacatgctgcccaggctagacttattttttctggtacatcagggatgtatgttgcaatctctaggtaaatccataagacagtaaaagaatgtataaataataagataattgagagtgttatgtaataatacatattgaatattttcaaaaagaaaataatgaagatgggaaaaagggagcctatactagatgatgcaaaagaaaggtaacaagatgataatatatttaaaatcgaatgaattacatattttaattaagggatgaagattattagactgtttagaaaaacaaagtcaacaatatgctgcttacaagggactatcataaacaggaggatagattgaaaataaatggatagaaaaagatagatgaaaagaaagctgaaatagctttgctaatatcagacaaagtataatttcaggcaaaaatattactagaggtaaagagggatatttctttttttttttttgagatggagttttgttcttgttgcccagcctagagtgcaatggcgtgatctcagctcaccgcaacctctgcctcccaggttcaagggattctcctgcctcagcctcctgagtagctggattacaggtatgtgccaccacacccaactaattttttgtatttttagtagagacggggtttctccatgttggccaggctggtctcgaactcccgacctcaggtgatctgcccacctcggcctcccaaaggcctgggattacaggcatgagccacagtgcctggtaaaagagatatttcataatgataaaaagtgtaattcataaggaagatttggaaatttaaaattcatttatatcaaataatgtaatctcaaagtcaacaaaactaaaagaaaatagataagcccacaatcacattaagggattttaatatgatccgatgaaataaaaaggtataggtttacaatatttgatcaacatgattaataagttggcctaattgacatacctacaacattgcacccaacaactacagaatacacattattttcaagagcttatggaacatttaacaaagcagaccatatgttaggccataaggcaagtctcaacaaatttcaaagaactgaaatcacacagaatatgttatctggctatagtagatttaagcgagaaattaatccaaagataactagaaaattgcccatgtgtttggaaaataaaccatacatttttaaataactgatgagtcaaagaagaaattacagtggaaactagaaaatattttcaaccaaatgataatgaaaagattacctataaaaacttgtcggaatttttactctgatcaagatgaagtacaggggctggatttacccttctgctttaagctactaaaaagtagacagacaaatgaaacaacatatatgatcacatataatggtgattatatgaataattaaatttctataacagaaacaagtgcaccaaaatgagaactcagtggataggtttgatagccgcttagatgcagctgaagagaaaattattgtcctgtatataggggcataaggttatttttgggaagtgacagagctcttctctgtcttcaccatggtggtagttacacaactgtatacatctgtcaaaacttggagctgaacactaaaaagtggaattattttatgtagattataccttcataaaaaatgggaaaaaggccgggtgcggtggctcatgcctgtaatcccagcactctgggaggccgagatgggcagatcacctgaggtcaggagttcaagaccagcctgatcaacatggagaacccctccccgtaactaaaaaaaatacaaaattagctgggcatggtggcgcatgcctgtaatcccaactactcaggaggctgaggcaggagaattgcttgaacctgggaggcagaagttgcggtgagccaagattgcgccattgcattacagcctgggcaacaagagcgaaagtccatctcaaaaaaaaaaaaaaaaaaaaaaagaaaagtcttattagagataactaaagctgtgcttagaaggaaatatacagctttaaatacatatattaagaaaataataaaaagtagaaatcagatctaagcatctgttttcataaatttgagaaagtacagcaaattaaacacaaaataaaaagaaggaaataataatgttaggagtaacaaataatgaaattgaaaacaaatatatgaaggaaaggctcacaaagcccaaagcttgttgaaaagatgaataacatttttactcatttttgatccttagcaattgatcaggaaaaacagagaaggcctaaaatgatcaggatcaagaatttaaaaagggcatcactataggtcaaatgaacatgaaaaaacataataagaggatattatgaacaactttatgacagtaaatttagataaaatgaacaaattcctttaaaaaacacatcataaatctgatacaagaaaaaagtaaaaatatagagtcctttatctattaagaaaattgaatctaatttaaaaccatttaacaaggaaaacttcaagcaggtctagatggtttctctggcaaaaaatttttaaacatctgtggaagaaataatacaaatagacaaatccttccagtggataataaggactcctttctcactcattttaggaagctattataaccccgataacaacatctgacaggaacattgtaagaaaggaaaattttagaccaatccctcttttaagtataggcgcaaatattctaaacatattagcacactttaaaatctggtatatattaagagtaatatgttaatttgtgcaagaaattaagaaaaagtaatacgtcatgaccagttggatatattttagaaatgcaaagatagtttaacatttaaaattcatcaatgcaatttcccatattaatataataaaggcataaaattatttgattatctcaatataaacagaacaagcttttgataaattccaacattcgttagtataaaaattcttagcaaactaggagtagaaggggaacgttcttagcaaaccaggagtagaggggaactttcttagtctaaaagggtatatttgtaaaaaccttggtaaaatgttgaaagaatggatgcctgctaaatatgactggtacaaaacgttgtactgaaggtcctagtcagtgcaataaaacagacaaaaaatgtataaaggttagaaaggaagaaataaaatgatcaacagatgacatatttgagtaattagaacatctggaagaatctgccaataaattatgggaataataaattaattttatcaaagtccctagatacaagtttaacattaaaaaagttgatctcatttctatataacaaagggaaacaattatagaatgaggttttaaaagcaatgctatttacaatagtatcaaaaatcaaatagctaggaatgaatccactgaaagatatgtaagagtctctgcagaaaactctaaaatattagggagagaaatgttaaaagacataaataaatgcagagagatactatattcatgaattggaaggttcgatattgtaaagctatcagttctcacgaaatctacaggtacggtgcaatcctcacaatctcaacaggtttcttttttgtgtttggaaattgataaactgattcttaaatttatacaaaaatgtaaaagtccagggacaaccaagacaaccacagaaaggacaaagttggaggaaagacttagtaacagatgacaataacgaggagagtgtaatatttgtgcaaggatacacaagcagaccagcaaaaaagaatagcagtttctagaaacagacccacaaatataaagtaacatgatttatgacaaaggtggcctttctgagtaatggggaaagagtggtcctttcaacagatatagctgggtcaatcagctatccataaggaaaagtggtgaaacttgactcctacgtgagaataatcagttccaggtggattttttttctttttctttttttttgagacagtcttactctgttgccaggctgtagtgcagtggcatgatctcagctcactgcaaactccgcctcccgggttctagcgattctcctgcctcagcctcccgagtagctgggactaccagtgcctgccaccacgcccagctaacttttgtatttttagtagagacagggttttaccatgttgtccaggttgtctcgatctctggaccttgtgatccgcccgctttggcctcccaaagtgctgggattacacgcatgaaccactgcgcccagccccaggtggattttaaatctaaatatgaaaggtaaaacaataaagccactggaggataggagaatatctttacgactttggggcaagaaaagatttcttaagtaaggcacgaatagcacttaccataaatgaaagacctatacattggattacattaaaattaagaacttttgttcatcaagtcacgttaagaaaatgacaatcagaatgagtgaggtgtttgcaatacaaattactgaaaaaagggtcatattcacaatatgtcatgaatttttacaaagcaataagaaaaggaataggaaaaaaatataaataaacttcacgaaagaagatattcaatgaactagtgctcagcctcaatgtttgtcagggaaatgcaaatgaaatttgcaatgagatgctactacagatccaccagaatggctgaaattaaaaggaccaacaatactaacgatgtaaaacagctggaactctcacccactgccgttgggagtctaaacaaccacttttgaaaactggctaaagtatctgctaaagataaacatacacatgttttctggcccattgtttcctttcctagtatgtagtcaacagaattgtgtatatctgcacaccaaagacataaatatcctcaaactagaatgtatccaaatggccagcaatagtataatggattaaaaatcatagtacattcccacagtgaaatattgtacagtcaaaaaaagaacaacttacaactactgcaacaatataagtaaatctcagaaacaatgttaagcgaacaaaccagacgtgaaagagtcctattgcgttcatataatgttaatatgtaaacatataaatttgaagttattaatataaagttttaaaactgggaaaacaattgttgtcttagaagtcaataatgtgattacctttggaagagggggcaggaaagaatgattgctagcaggcccagcaagtcttttgggatcctttgatgttccagttttgacccgggttggggttgcacaggtaagcttgctttgtgatcattcagtaagctgtacacttaggacttccacacttttctatatgtgcattatgcatcaacaaaaagtttaaaagtgcaaactagaaataataaatatttggaaaagtaatttcatttagcaaacaattagcggatggctctgatgtgccaagcactgtgctgaggaagcagtgaacaagttggtcaaggtcccttcccataaggtgcttaccccatgtgtgtgtgtgtgttctgcagcaaatcaagaattataatttactcttgactgggaaagagcagggtgctatgggagcctgtggaaagggcacctgacgtttctgcaggcagtggtttctctgatgggaactgaaggatgactaagagttgagcaggtattgatctgcagtagctgaaaaagaaataggaaaaaaggagagttaagcaggtaaaggaagtgaaggaacagcactccaggcagagggaatagcatatgcaaaggctccatagaggtaaaagaacatacatcacttttaaagaacccaaagaagttcattgtgagaaagtaacagaaaggtagaagagttaggcagtggctgaatcatgaaggttcctctaaaccatgccaaggaggctgggaggctggagtttttttctgagggcaatagggagctgtccaaggataataatgggtgaaaggagtggataataaggtcagatgatccttgaagggataatgatggcttctggatggtcaagggtggaggaacagagaatggtgagatggatgctcagaggaggcaaaggaatggtagcagagaaaagaatgggtgagaaaaagatggagtttgagaaaggtttaggaagaagaatagacaggaccaggtgctggcttggcttgagaggtggtggggctgactgtcaatacttgggcagtagcaagtcatttccaacaagatttgctggagatgagcaggtgacggaggtggcccagccgagagagaccctcaagcctcatcttgcattcaccacacagcagcttcggctgctgcaccgttgcagtcctgctgcttctggctaatctacatccaaccttctgttcagaaccaagccctagggaggctgctgggggaaagcaaagcctggcactaaagaagcatcctgacaaaataattacagtgtcagcaagacagccgtgagttgcaaataaaatttaaataatccgagtgctgcatccaacctggggggctaattcaaatactctatgcttcaactggggatctttgaatcacctgctgacctggactccccccttccagaagctgggaattgagggttaagtggtctgggtaatttgggaccaccaggggacccatgatctgatattggcagcaggtcagcacagtcctgtgaacctcctgatggcaatgtctgtgatgaccatctgttgttttgaccaacctagctcacattccttcttctggaagcagcaccttgttttttgtttttttgttttttttgttttggtgtgtgtgtggggaacctccccttcctcactcttagtccacttggctcagatggatctgacaccactctcccgctccactgcactgcagatggtaggtgggggcttcctgcagaaagaggggtcttcccatgaagttcctgcgaggattggattggtcccgcctgggctatgtgcccatccatgacccagtttctgtggcttcgaggtggggcactctgattggtgattggatggacaggggccatatgccacccttccgatggagagggtgcgttgagtcactcacagctgcacgagggcaacagggcagctatcgaatgatatctttttcagaaatgggttcctccgagcaatgacaggggaaaggagggcggatgacctctatccctgccccagttcacatctccagcttccttccccacaaattcgtatatttttgtcttcccagccgctgtctcccttcttttgacaacaaaatatgaatcttcccatctctcttctcttgtgcagcttggagagaccgttggtccaggcttcctgccctcttctgtcaggagctgggcctgggactgaggtttgtgtgggtctttgactcaaggattaaaaatggcgggtgctgcctggggcaggatgacgcctagccgactttccacccacgctacccagacccacggggttgccctggttcctgccctttcccaaacccggctttttagctttccttttatcttttgggccagcccatattccttttatttttttaaaaaaatcttaaccctttgatctttctttttgtgaaaaattatggtaaaattcacattacactaaccattgtaaagcgtacaattcagtggcgtttagtatattcacaatgctgtgcaaccagcccttctatcccgttccaaaacattatcatcgcccggaaaggaaaccccttacccgggaaacaatcgcttcctcttcctgtctctccccagaccctggcaaccaaaactgctttctgtctctggatgtacctattctggatattacatgtaaatggagtcatacaatacatgaatttttgcgcctggcttcttttggttaacaaatggtgtttgagggtcacttgcattgtagcctgtgttaatgcctcattcctttctaaggctggagaatattcccttgtatggatagaccatattttacgtaaccattcgtcagctgatggccatttgggttgtttccaccttttggctgttgtgaatagtgctgctaggctcacgttctctcagtacatttttttttctcttacgttttccagaattggcttctgttcatggctattgagaaatccttactgatggaatgccaaaaaggctttattttcagggctccagaacacatagtccgaggaaggtgaaaatgtaaaaaacatctccgatgaattagactcagcagggaacggtcccagttccgggaggacttttgtgaatgatcactgaacgccgtggttggtgcctcagctcggggccctctgagaggtgccatttgctgagaatgctttggagaaaggaagccaagaaggcactcctcaaaggatggcagctgggatcattttaagtttttatccatcccctttggaatggagaggagctagggaagcgagcctttggggactcaatgattgcagcccttcccccagctggtccaacagtaaagcgacagatacatgctgagagagcagaagcttttaggtgctgattataacttgggtgacaagtgacaagatgcaggcaggcctgggtaagataaaaagatcgcagcagctgacagctattgatgcttcctgcacaccctgctctgtgctgaaccctctgcaggcatcgtctcatttacccctcacagcagcctacggggaaggcactagtgctagcctcactctgcagagaagaagggggtgcacagagtggcttaggcactcgtcccagatcacagcaggaagtggcagagtggtgctcttaaaacagtgaagaggaggctgtaaaaggcagctcagcatctggctacatgtgtatctgtgtcctgtttcacagatgccttaattctcttccagggaatcatggaggttcctctccaggggagaagtggggcttactgagtgggaagtttgggggttcagttccatgaggttcctgggaggtttggattggtcctgtctgggccatgtacctgtccatgccccagtctctgtggctgggagatggggcactctgactggtaattgggtggacacgggacatatgccacctctctgacagagagggtgggttgagttactcacagttgcacaaactcagaaatgggttcctctcagcaatgacagggggaaagaatggcagatgacctctgtccctgcctcagctcacacctccagctccacaaagagcaatggtcctggagtcacttgctggctgggtgaattaggcaaatgacttagtatttctgaacctgtttttctcatctgcataaaggaaacaatagcaggctctctctcataggatgattgtgaggattaaatgagctaatgtttgcagaagtcctttatcaactgtgatagccccatggatttgctttatcttctacttggtacccctccctgtctcccttattattaaggtgtgtctgtggcccagtcaccccagggcaggagtggtctgctccttgcaaagtgagcgctcatctaataagcatgttgggtgccgatgggttaagagcatccttgtgaaactgaggatagctaataatgatcatctgtgatatgtttcaagcactgagccacgggcttgccatacagccatgtgaccctcacgcgattcctcccaggtagggtctggtattatgctcactttattgaataaggacactgaggctcagagagggagggaatgtgcagaaggaccctcagctaatgaggttcagagctggaactcgaacctaggtctttcagattcaacctgtggccttaccaatggtgcaatagccctttgtgcagctaaagttggccttcccacacagcagagagtgcttgggagagcagcttttggccagcattcgacaggggcatttcttgactcactagagcaatccaaatgtgtaacttgctgcctttcctacccgtgggctgctccagtatcttgcagagagcgtggggtgggagtggggaaagatgaagagacacagggcagtccttggggatggcagcataagtgtacagcaccagtgctaataatcagcagctcagtgagtgcttattcaacacacattcattcattcgtacatatgtgggagtcaggtatgttttgtttttagggtttacagggacctatgggggaaatgaagggatgctaaggtacattccttactgtggtgggcatctgatgttgtaaatccctctttcccgcctcttctgataacagcaccagtgctcttttggaggacgtacccactccggttcaggtggctgaggaggggctgagcaccgcgtcctctgaccaaggttagcagttccggggtgggtcagcctgtgtggaaggcagcagagcttggagatgcaacatccagaggggatctcttagcctactggatccagttagatgtgtccctagagttttcacttatgagaggcagtaagcccctttaaataatcaaccccgtttgaatagagtttctaccatatgcacacttgaccacaaggagtttatgatctcaccgaaaaaaacaagaaggaatagccttctacttgattgttatacttgcatgtgcatataggtatatacatctgtttatgtttaagagattattctatgtttaagagattatcctatactcacgaagagctggattttagttctggctttgactctaagtcatagtgtgaacatgggccaacaccacttcctctctgagcctcagtcttcccatctgtgaaatgaatgccctgggctctctgctccctaaagccaagtcccttccactcttttttttttttgagacacagtttcgctcttgttgcccaggttggagtgcagtggcacgatcttggctcactgcaacctccgcctcctgggttcaagctgttctcctgcctcagcctcctgagtagctgggattacaggcacgtgccaccacagccagctaattttttgtatttttagtagagatggggtttccccatgttggctaggctggtcttgaactcctgacctcaggtgatccacccgcctcggcctcccaaagtgctgggattacaggcatgagcccctgcatccagcccctttcactgttatatactaggaatttaagattagtatctgtgggatggctggagacaaaataatgagaaaccaagaaaacattgatgtgccctccgctagcctcagcattctgcttgttgatgcagaaatgagaaggacctaggacctgactggaaggaggagccgggatttgtgtatgggaggccgcagcagcctggccatgggttctgctgcctcctgcagatgcgtaaaacattgataaggatgatgcctgcaaagcgcccttcacagatggctgtgggctgtacccggagcgcggggaaggagatgagaaaagtaagagcagttggcttcagatcagccccagatagtggcatggggattgaagcttttaacacagaccttgaatgcccgtgacccacaggaacagtggccaatgttctaaactaaggagatgcaaaaacatccagctcagtctcctctgcctctcagactccagacatgtcagaggaggatatgacaacaagcttagagaggcaactggctttttcccctgaatctctggtggaaccgatcctcctgagctgagataaccatttacactattgattgactgattgatttctaaaggtgaaaagcatatttgttagggtctgtttggctccaaaacccctgagtaacagcagctaaaaggataagaatatcactcctgtcttaacaaggtgtctgggcagaagtaccaagataccgcacgtcataaaaatgtcatcagggaattaggccctttcccagtctcctttctgggttgaccctctgtccttgaatttgttatctccaaccctaagatggttgccacagctccaggtgttgtgtctctgatcctcttctgcatcctagggaggaggcagggcataggtgagaggctctctttgtaagccgaagccttttgatctgaaacattcactttctagtagcctttgaagagacctgcttatacaactcatcggccagaatggagggacacatcccactccaggctgtaaagagcctgggataagtgttagtgcatagaggcagaggagaaatgggctgatcaggtggttgatggtggaccaaggcagaacagggatgaacataagccctaggaggggcctcccatatgtttctccactgggggctgagtctgaggttggcttacagattgtctggtccccgattcttctcttggtttgaccacttgctcaccatgtacccacaaagtacaagacagaggtttcagtttgtggagcagaggctagaattgaatcccagtgggaatgaactaatttgcagacgctatctccaaacttaaatatttgatacccattaagcctgtctaaccaaagcatctccccaggcatgagtcaccaaacttgacctgctctccaccctcggatctagtcaggctagacaacactgctgtcaacaaattttaggatctctgtggctgaacctggatgtttacttttcatgcacacagaggctactgtggatctagagcctctccatggaagctccctgcagatgggtggctccagtctccaagggcttccatcttatagctatacgtggctccagggtccctgtggcaggggaggagacccacaggcttatgtactggctcttaaatgcttcagccgggaagggacacagctcccttctgctcacagcccattggccagaagtagttacatggccccacctaactccaagggaccagcccacgaggaggagtgcatggatggatgggagtgggaaccgtggctccacacctgccctgtatggctccccgccaccctcaaggtcaagtccttaccccaacctctcaggcttccccaatccccactgcacagcccatggttcagggacacagaggcacttcagtactcacagcaggctttccgcaagcttcgctccttgccttcacacatgctgtccctctgtcccttccccttctcctgggtgattcctgctcattcttcatgtcatggttatttatgtgtcaacttgactgggctaagggaagcccagattgctggttaaacatgacttctaggtgtatctgtgagggagtttctggaagagctgagcattggaatccatagactgtgtaaagaagaccaccctgcccaatgtaggcatgcatcatccagtcctctgacagccccagtagaacaaaaaggtggaagaagcatgaatctgtttcctccattggaggtgggacctccatcttctcccactctcagacactggtgctcctggttctcaggcctccagactcagactgggaattgcaccccaggctatgaacttgaactgaattacatcactggcttttctggatctccagcttgcagagggcacatcacgggacttattggccttcagaatcacgtgagcaaattctcataatgaatctcctcttataaatctgtctgcatcctgttggctccatttctctggtgaacgccaactccaacacttcatggctcatcttgggttctgtgttttcccttccgttcaggggatcgggtgtgttcggtgggctcccctcaccccctccatgtacaccattgacgcctcatcacccggtattttatctatctgtttccttggctctcccgcactagcccacaaggtatgccttggtgctgttaaccgtgtatgcccagcatccagggcagtgtctcacacagagtaggaacccaatgaccatcagttgattaaaaaaaaaaaaaaagcagtgaataaatgtttatttcagttgctttaaatccgtatcttggaaaatatggaatgaagagaggtaaataagtttcattagagatccgtctgtaaaaaaaaaaacatagcttcctgatgacacgtggctgtttcctgaggacagagaaggaagctgcatccctgcctgtcctttagagtaacgcaggctgagactccaagtccagccctgtcaccaggaagccacaggaccctgggagagtcacttccccattttgaaccttgctgatcagatggggatgataacagtatctgcttcgaagtctcatcgaagagggcatgtgaagccctcagcacccggcaggtagactgcatgctctcagtgagcatcagttcttggtatgatggtttattatttctaatgatcaaaccatattagtattggggcttaaagaatcctttaaagaatgcagcttgtgctggcatttagagatgggagtgcgttctgattccacagctagctggtggggggccctcagttccttcacctccacaatgaccctctctttatttcacaagtttgttctcgaggtcctgtgaagtaactacaaaatctcgtttctttactcaagcacaccgcgagcttggtgtgcttgaatgcttggtgtgcaggctgtgagggtagctctggcgctgggttgctagagttggactcccagctgtgccactggctgtgtggctggagctgctaacccagcctttctgtgcctcagtttcttcatctgtaaaatggggatcccagcagtacttatgactcgcggggttgttgtgggaattgtgttaaacacatcaaacatttagaaagtccttggaatataataagtgctcaataaatgttggttgatatgattcttgttattgtcagatgctaacgacaggtgtggaggatggagtggttcctccccccgtggagcacacggggagcagaggagcaggagaggtaaatgagcaatcaaagcccgggtagaaagttctacacgcaggagattaagagggagccagcacaaatgtgggccgaggagccagactggcttggctcagaattctcgcctcacccttattagctgtaaaaacgggactggcaccaggaattacccacctcacccaatgtcgggaggaggaactgaacaccagcatgcttagagcaataccactccgcattgccagaggggttaggcattcttttcactgccaaccccccaggtggaagacaagggaaggctgagataaggatgagttgggggaaggcacaggggtggggtggggtgggctggagccaggtgatggtggagaaagaaagaagctctgcatggcccccgcgggatacgtgaggcagcacaataagcaccaaggctgcagatggctgggaccatcttcttatgtgttctttcaacagaggtttaccgagcaccttctacaaccaggccctggggggacactagtgcacaggactcagctaagggcttagctcagggtaatggggagccaagggggggatattgtgcagggaacaaaaggaaaaaatatgcctttgagaaagatgtggagggccaggcacgatcatgcctttaattcccgcactttgggaggccaaggtgggaggattgcttgagaccagaagttcaagaccagcctgggaaacatagtgagaccccaccccccaccatctctacaaataataataataataataataataataataataataataattagccgggtgtggtggtgcatgcctgtactctcagctacttgtgaggctgaaataggaggatcacttgagccaggaggtcaaggctgcagtgagctatgatcacaccactgcactctagcctgggcaatagaacaagacagcttcttaaaaaataaaaataaaaaaaaaaagatgtgaaggctgaatcagagaggatcccagatcccagatcccagcacagatgtgaagggtgtcatcctggcctagtcctaatagagttgtcctgataaaggccaaaactgcagccctcagcccttttcctccctcactctcagacctccagggcccatcggaagggttgccatataagatacaggatacccagttagatttggacttcaaataaacaacaaataattttttagtatgaggctgtcccaaatattgcacaagacatgcttatataaaacacctgctaacgctggtcagcctacctccatggggtcgcatccgagagctgacgggcagcatttggtggagtgccagttacttcagagtgttcacctgagctcagcctacagccggatgaggacagggctaacaccagggacgttttctttgcaagatgagtcagagagaagacagaggagctctgccggcctcctcgggcccccaggtttacttctttcctcttttccagctgaccagggtctttctcccctgcctgggaggacttaagccaggcagcttccttgagtcagttcagatgctgaacagataagacacagctctttgtgccctgggagctgaaggatgccagctgcacgcgagattcttcaactgtcttacgagggcagtctttgcaaagcgccccctccatgggcaggaatagcaaacactaccatcgtttaggtctgttttttatggcaggcttttgggagtcaaatgtcttttggtttgagtctcagttttgccacctaccatgtgcatgaccttgggcaagctgcttctccctcttgggttcagtggccaatctcatgggcttgtggggagttgaaatgagcagatgtggataaaatgcttagctccatagtgcctgacacctggtcaggcacccagaaaaactacggtgacacaacccaagagatatcatctccatgttaccaacaaggaaccaggctcccaggggcaaagtccaagggtgggtatccagtaaccagctgagccagaccttgcccctggcccctatgctgaggttcaccttcctgaaacttcacatcagatcatgaaatgccaacccagaagggttctccaactcccagagcccatggacttcttggaaaagctgaaacttatttgattacgagactaatgcatattcattgaagataatttagaaaatgcaattttgccaaaagaagaaaataaaactcaccagcactctcaccacccagagatagtcacggctgacgtgctgtggtgtgtattttaaggccttgagggaaattttaaaaacttaaaactgagatttcctgcactgcctttgatcacagcctggggcttcggcagggtgtctcagcctcagcacggctgacattctgagccggatggttctctgtcgtggcaatgtcctgtgcactgtgggatgtttagcggcatccgtgacctccacccaccagatgccagtggcgcccctcataggacaaccaaaaatgtctctggatattgccaagagctaagtgcaaaattggccctgtgggccatcattgggtttaggtgtagaggctctgaaatcagccagacctggttttaatcccagattaggcatagactcaggcaaattagttaatgaccatgaacctctccgtctccatctatgaaatagggccaatacttcccatctggcaccattggtgtgagggttagaggagacggtgtttgggacatggaaagcttcaatacgagaaagctgctattgattttggcatcctcatagcccgtggcttctctgatgaggactgacttcaaaaaaactcaaacaaatcaacagcggaaactcacctgcctttggaagacccttcactcctgagtgagatatgcagcttgtcttagaatggtggcaagagttaagattgagagggtggctatagagccagcccctctgcttttgtgtctcatctctgtcccccactgcatgtgtaagtggccttgggcagatgactgaacacttctgtgtctcagtttcctcatctgtatcatgaaggcaatggcagtacccacctcttggggttgcaaggactaaatgagttcacccaataaatggctttattaataaatattatttggtcagtgcaaaagtaattgctgtttctgccactacttttaatattacacatggccagtctggtgtaggagggaaagggtaccttagaaactaccaaaatgaaattgtgccttggagaaacattgagtgagagggaggctctggatggacgaattgaccacatgtgcctggctatgcctctcttctttctagaccccaggcacaattgctgtccctactgctccaaggcttgtgagtgacattggactggcctccatacctggaacattggagtctacaccccagggaaatttcagtttaaaaaatccattgtgtcccaggggcttccaggtgattttttaaaagttaaaaaaattatggtgaaatatacacaaaattgaccactttaagtgtgtaattcattaagtacatttacacccttgtgcacaacacaaaattaaccattttaagtgtacaatgcattaagtataattgtattgttgtgcaaccattaccactatccgtctctagagccttttcattttcccaaactgaaactctgtacccatgaactccctcctctcagcccctggaaaccaccattcagctttctgtctatgaatttgactactttcagtactccatataaatggaattacgcaatatgtgtccttttgtgacggccttattttacttagcataatgtccttaaggttcatccatgttgtagcatgtgttacaatttccttcctttttaaggctgcataatattccactgtgttgatgtagcacattttgtttatacattcatctcctgatgggcatttgggttgcttctgccttttgactattgtgaataatgctgctatcaacactagtgtctatgtatctgtttgagaccctgctttcagttctgttgggtggatacctagcatcagaattgctgggtcatatggtaactctatgcttagtttttttgcgaaaccactgtactgttttccacagtgggtgcaccattctacattcccatcagcagtgcataagggttgcaatttcttcacatcttcaccagtccgaagtgtttttaacccagctgtcctttggatttttacacactgaaaacagtatagcgtatgtatgggaggggcccttcttcataaaaattctttgtatttctaaagatcttcaaacatttccagtgagctgatgcatgtttgaacttcacaacagtacagcagggtagaaaaggttgagaccactgtttttttctctcaatcaatctctcctttttgagaaagagaggctgaagaacagctcagtgagtctgggagattccaaactagaactcaggtctcctgacctcctcgagccttttcctagagcaagcaggttgccacctacgggttccctgttcccagttgtgttgccttgggcttgggctcaggagactattttttctcgctctgtcgcccaggctggagtgcagtggcacgatctcggctcactgcaagctccgcctcccgggttcacgccattctcctgcctcagcctcctgagtagctgggactacaggcacccgccacagcgtgcggctaattttttgtatttttagtagagacggggtttcaccgtgttagccaggatggtctcgatctcctgacctcgtgatccacccgcctcggtctcccaaagtgctgggattacaggcgtgagccaccgcgcccggccgagactatttttacttttttcttttttttttttttaaagacagggtcttgctctgttgcccaggctgagtgcagtagtataatcttggttcactgtagccgcaatctcttggactccagtgatcctctcacctcagcctcccaaagtgctgggattacaggcatgagccaccactgcaccaccatgcctggctactttttgtattttttgtagagatggggtttcaccatgttgcccaggctgatcttgaactcctaggctcaagtgatccacctgcctcagcctcccaaagtgctgggattacagatgtgagctactgcgcccagccgagattttcgacctgcttgtaagcacagaggcagcaggatctgtgaaacttcccaagccagcctcacccccagtgctcaggggctatggacatgccaggtgagtcttcagcatggcctagattacaaaacctcagggtttgcccctcaaaacttttctgcagggaccaaaaagtgaagggagaggaaaagaccctcataggattctctcccctgtcctggagcacgccactgccttcacacctgggaggcagacatcagagatgtttaaagctctactgtttgagggacaagatttcacatgcgtgcctcttttatctggtttctctttcacatatttcatgagatgatggagcaatttgaaacatatgctgtttttggtgattgtcatttcttcctgtaggttaattaccatttgatatcatttctcttcagaatgaaaagctttctatagctgttcttatagtagaagattatggtgatgaatttgctccatctttttttatttgaaatatctttattttgctttctcttttcttttcctttctcttttcttttccctccctccctcccttccttccttccctccttccttcctttctctctctctttctttctttcattttctctctctctctttctttctttctttctttcttctttctttctttctttctttgtttccttctttctttctttcctttctttttttttttgagacagggtcttgccctgtcacctaggctggagtgcagtggctcaatcgtagcttgctataacctctaacttctgggctcaagcgatactcctgcttcagcttcccaagaagccaggactgcaggcatgtaccaccatgcccagctagtttttatttatttatttatttttatagagacagggtctccctacattgccaaggctggtctcaaactccggggctcaagtgattctcctgccttggcctcccagagtgttgagattacaggcatgaaccactgtgcccagccttgttttcatttctgaaggatagtttcatttgataaagaattatggattcttcttttttttctttgaacatcatgaagatgttactccctcctcttctggccttcattggttctaatgagaagtcagccataattcttatcattatcttccagtatataatatgctgcttttctttgactactttcaaggtttttttctttatatttggatttcaggaatttgactgtaatgtgcctctgtagagctttaatcgtatttatcttatttaaggtttgctgaacttcttggacttgtaagttgatgtctcttaccaaatttgggaagcatttggccattaattcttcaaattttttcctgcccatgcaatctctcctcttcttctgagactccagttacatttatattaggtgacattaagtctctgaacttgtttataatagctgccttaaatttcttgcctgaaattattgcagcatctgggatcattttccattaaatgctttttttttcttgatgatgacccaccttttcctgcttctttgtatgtttagtgacttacgattcgctactagacttcatgaatgatatgttgtagagattctgggttctgttgtgctcctttgaagagttatcatttttttctagcaggcagttaatttggataggctcatcctccaaactctgcctccctcaacgtcagcaggaactctgactcagttctttagtttctcgctgctgctgctttttcactgcagttcctaggttttccctgaccagtgtagttttgtagtcagctaagaatttgggtgcattttatatagagatgtcacagctaattccagtggcagttcctcctctcccaggattgaccacccaacattccagctgctttccagtgctctacctttgacacctccagccagtaaactgcagctttttgtcactcttatctgcttgtggattggcgagtaccctcaggcaaaaagtcactaatatgcaaatcccacacttagcttcctgtctttaagggtagagtctcctctctacccttaaacagtttctctgtttctggttgttctccagagccttcaagtagttgtttttaaaaatatgtggcgcagattttataattatgtgtaggttggttaggccaacccctcgactcccatctcattcctatagcattttacaataacttggaatttgaggccaacataaaaagttgaaatatttcacaaaaatatgatttggaggctgcaaaaaatcaaatttttccaatgtgacaaattgattggaatcaaacacagccccctggcctcccccagcatcaccccaccaggaaaagcatggcttttccagtttgatgccctgttgtctaccctagctaaggccaactgtcaatttctttgtatcattttcaatgtggttttatgggccactgtttccaatcaaagcctatttcagagttttttcttgtacccccactcaagtgtgggcccagtggcttattctgtgacctacttgcctatcccctttccccataatgctgtctgtcctcagagcttctttttcttcatgctcttaaacattctttgacattttctccccttcctccaaccctctttctttctccttcctccaacattaactgggcatctcaatgtgctcagttatgtgcttagcactgtcctaggagctgaggaaatagcactgaagaaaacaggaaaaaaaggccgggcaaagtggctcacacctataatcccagcactttgggaggccaaggtgggctgattgcttgaggccaggagttcgagaccagtctggccaacatgatgaaaccccacctctactaaaaatacaaaaattagctgggcatggtggtgcacgcctgtaatcccagctgcttgggaggctgaggcacgagactcacttgagcctgggaggtggaggttgcagttagccgagactgcgccactgcattccagcctaggtgtcagagcaagactctgtcaaaaaaataaaaaataaaaagaaaagaaaagaaaacaggaaaaaaaatattgccttcatggagttgatatgtgaaggtaggatcatgaccatgaacaattcatattatagtggtaagttctgagaaagataaggctgggtaagaggatgtagtcatgggtgtgcaaatgtttctatgtcttactcgctcagccccaagctaatttttcactgaatgaacagttctgtacttgttcatgttttacgcccctcaggtggcaggaagtgctttgtatgggtcagtcttgactttatccacctcctagctttgtgattgagaaattcccccactgctatgccccagtttcctcatcagtaacatagggataagaatagtacctaccttttagggctattgagaggattaaatgagttaatacatgcaaaatgtgtgtttaacaagggtctggcatatagtaaatacttcataaacattagccaataaagatatcaattacccaacacaatgactgacacattgtgagcaataaataaatagtaatgtaatggttaccattacagatggcccctgatttatgaccacttgacttatgactttatgatgtttcaaaagcaatttacattcagaagaaaccatacccatacaacgattccgtttttcactttcagtacagtatttgataaattgcatgagatattcaagatgttgttataaaataggctttgtgttagatgactttgcccaactgtaggttaatgtaagtgttctgagcacatttaagataggctaggctaagctatgatgttcagttgcttaggtgtgttaaatgcattttagacttacagtattttcaacttacagtgggtttatcacgatgtaaccccatcctaagtcaaacagcataggtatttccccagttctgaatactgatatccagtagattgcttttctttctaccaggtcaccagtctcatctcccttgttggagctaatggaaaatggcagtgagaatcaataatatagaaatcacatattggcagcatcatggaaagctgcctgggaggaattcagtggggatctgggactagaggtggctgctattgggaaggattccacatccagttgttgttgatgtgcgaaataacaacttgagaagtgagaaaatgccacagtagaactccaggggctggaccagctctacagacccaataaagttgagtcaacgttgaaggtccttcaagaaacgtccattctttccttcctctatccaacatcaacttccatgcctgtccaacatgttcctgccaaaaatgactccctgtctccctgccatctctggggggcattatttggcttgggctcattttccctccatcccctaatgaagtttcaattgctctttattattgtcatgtactatttcccaaattctcaggcaagctcagggaaggaggtatcagaattctgccagcctcactggctttgatagatatttgccagtgcctggttgggctgctttgattttgtgtttctgagttcctggtgaggagctggcttgcaggaaacacatcattaagaggagctgtcagaacaaactgctttgtggccccagattgcttgtaggtggcaggtgctgaagccttgggtccaggctctacctgagtgggtaaatgtttaccgagtgccatcggggggtcctgactcaagtcacctctcttctcccacagtcccactgtggggcaggtgttctgtttcaaagaaaaaagggacttgttccgtaaaatggggacattgaaactttggcattttccttcctcattacgactttatatttgttatgaaaaggtctggctgtgaataacagagacccagataacagtagctgaaataaggtagaagtttatctcactctcttgtaacagtccagagggaggcagtgtagggctggcagggcagttctgctccacaaagtctccaggtggcctgttgcttccctgtgcatatcttccatttcccaaggtcacctcattgtccaagagggctgttacagctcctgccatcatggctgcattccagccatcaggaaggagaaaggacaaagacagatcactcacttgaaggactcttcccagaagttgcaggcatctcttccactcacatccctattggccagcattgagtcacatgaccactcctagctacaaagaaagctgagaaatgcagtctttattcctagtggccatgtgctcagccacaacgcatagctgctaggaatgtgagctctgtcactaagaaagaaagaaaaatggtcgctggtggagaactagcaggttgtttggaaagagtgatgatgctgtggaaaacattgccgaatggaatcagaggacctataagtttgcacttcagtctgtcctataactttctcaagtttcaatttccttacctatgaggtggggatgatggtgactacctcacaatttgtgaagattaaatgacatggcatattggaagataccttctaagtttctcaaaacgtctgcatacacttgaggacacgttgcgaaaattaatttccgatgctgataatgtgtgtatcaaatgtatggaggtctctttatgaaaaagcatgcacctgtctgcaggctccccacttacctgggtcctggaccttatagattctctgtagctgcttggcaacagaaatcatttgtaaggtacctgaggctgttagtgtaggatgtagggtcatgaagtccaggtgtggtatgggaaataattgtaaagtgtggtgtgggtacaatcagtgcacacaattttagagacaacacttaaaactttttaaatagtgatatgtttatttgagcatattaaaaaaaggaaaatttgacgatcaaacttggcaatttaatggatattattgcttagggcaagactgagttttataaaaagtgagtttattaatgaaaaatttaagtaaataataatctaagtggtacttggctttagcagaaactcagatgggaattgcaacttcagctaacaccttgatttcagcctgggaagccccagagcagaggatccaattaacccttttttcctggacccaagacctgtggaaactataagatattaaatatgtgttgttctaagttgttgagtttgtggtaatttgttatgtagaaatagaaaactgatatatatatagttaaaggttaagacttgaggaatgtcactcacctggcaaatttcttaaaccatttcctcatttgtaacatggtaatacccatttgtcagtttgctggaggaacaagtgaggaaataaatgtaaattcttacctaaagtgagggaaatattgggcttagtaactgttggttagaacacaagggttataggatcattcccaccacttttccccagtttcacgatcccagggatgggcaaaccttgacaaatttcaattaagatttacagtatacaacttggcagaacttctttatcttttaaagatgggatctcgctatattgcacaggccagagctcagtggctattcacagggaccatcacagcacagccttaaaccccgggctcaagcaatcctcctgcttcagtctcctgaagatctgcaattacagacatccaccaccacacctggctggcagaacttttatttaatagcctagtttcttgacttggttctttctaaccatttcaaaagggtctgagcttggacacaagcctgatgagacattggagcatggaaaattctggccaacacaccatctttattagggaaaactgagaggccaatgcttttgggtgtgaggtcagatggaaggacaaccaggtgacaaggcctccactgagattcctgatacaacatcctgctcatgtctgggggagaaaaagtgctctgcccagaattttgatggaataaggatttcagataaaaaggctttcaaaaggccttggaaatgatttcttagagcaaaaacaaatgggtgcccagtgagtatcttaatccaacttgagttttgctaattaggaagatttgatcattattctaaaataacttcactgtagataagaaatcacctgggtcacttattctaaaaacttcccagatccccatttcccatgcccagagagttggattcgggagtcttaggtagatgccagctgtctgcacttttatcaagcaccgccggtgattgtggtgtttgtgggtgatgagggctgcaggtgcactggtaaatgtctaacaaccagctttctggggaagtaaaccctgatccgtagcgtctgcagttttccgaggcagaaacgctcccaccaaggctgatgtcactgactgggcgcagagttgggaagaaagacgaagtagcccttccagcacacaggtacgcaaataatcaaatagacacaaataaccttaggagcatagaaggagtgaaatgtagtaaaatgattaggaagtgctgggttgtaattatgtactatctttcttttaaatataccttatttaattctgtttatataatttgatggttaatagtggttctgtttatcaactggttcacacaattcctaaaaatgtaacattaggctttcccaagccagcacaagtcagattcagcacattgagcaaggggacactggtttgattctaaaacaattgtatgattcctgggggcagggccccggcagcttagatcgaagtgctccccaggtgatgccaatatttagtcagggctgagaaccactaacctaaaccctcactactcaatgtgtggccccggaatctgctgcatcaacagaatttcaggcccaggcccagccccagccctgctgaaccagaatctccatttcagtaagaactccaggtgattcctgcgtagcaccaatgaggtaaaggactcagtggttcccaaacgccagtgtatgtgcacctgctggggcagagtccttgatgtgagttaaaatgcagattcctgggctcaccttgaggtccccactcagtggatctggggctccagggatccgtattggggtgtgatggggttccccgtgtgctctgaggcacttcctggtctgggaaagtgctggagagggttggattcaaacagatttatgggatggaagggaaaatctaacacaaggaagacgaattcttaaatctgcacctagtgagtgtcactaggtaaaggagaatgcaaggatactgggaagaatgcagaatgatttcggggccaggaggagctactgttaagggagacctcgtgcttggccactggggatgctcaggcgtgcatgtgcccaggtgtggatggaacagcatggggagtggagtggcatggacttgagagtcagggtcctggatttgtttcccacccatcactcacgagcagtttcctaatggctctgagctttggttcgttcttctgtgaaatggggattataatctttcccctcataggggttgttctgagaaaacaatgagatgatgcgtgtagacagccaggcactcagtaggctcagcccatggttgctgcgactgataggatctctctgcgcgtgcctgtgcacatgtggtcctcactatggtggtgcaagaagatcagtaggaggcgagcaagatgccacacgggctaaccccagaacttgatgctgagttcaagggcaaaccagaatgccaggggaagtggacagaaacctggcttttgttagaaatgctcctaactaaatagcactcctctgggagggtaaattagaaaggccaaagctacaacctgcaaaggacagaaagaacacaaaagcacattgttccacgatgctgggtggaggaacagagggaagtgggaggaaagactgctcctctgtgtctggaaggggaaaccactaagtgaagagtctgaaggagtctattttcttttctttagtcttttcagcaaagataagccacaaatagctggctggagcacttcccagctagacggctggctgataatgggatctggttaaagatacaggaggttgaaagcatgaagtccatggcgtctccaggttgctcaatgaattgggcagatcatcatgtggctttcacttttttttttttttttttttaaattgagacagagtcttgctctgtcactctggctggagtgcaacagcacaatcactgctcactgcagcctctgcctccctggactcaggtgatcctccccactcagcttttcaagtagctaggactacaggcctgcaccaccacgcctggctaatttttgagtgtgtgtgtgtgtgtgtgtgtgtgcgcgcgcgcatatacgtatatgtatgtgtgtatatatatacacacacatatatgtacatatatgtatgtgcatatatataagtataaatgtgtgtgtacatatatgtgtgtatatacatatgtatatgtgtgtgtatatgtgtgtgtgtatatatatacacacacatacacacatatatacaaaatatatataattttgtacagttgagctttcatcgtgttgcgcaagctggtcttaaactcctggactcaagccatccatccacctcggcctcccaaagtgctgggattacaggtgtgagccaccatgcccaggccatcatgtggcttttagcccttttagaaaacgcacaagagcagtccttgactcagaggagcagataggaagcagtctgcagagtggcgggcctgggaattgaaggctacagtgaacagccacgaggcacagggagttcagagatggggacaaatcttggggagcatcttaccaggaaggtgttcttcacgtctaagcccccgagctctgtaagtagctcctgttggcctgtggggatttgcaaggagaatggcaatggatagaaaaggctttgagccagggacagtggttcacgcctgtaatcccagcacttcgggaggtgggtggatcacctgaagtcaggagttcgagaccagcctgaccaacatggtgaaattccgtctctactaaaagtacaaaaattagcctggtatggtggcacgtgcctgtagtcccagctactcaggaggctgaggcagaagaattgcttgaagctgggaggcggagattacagtaagctgagattgcgccactccactccagcctgggaaacagagtgagactctgtctcaaaataaataaataaataaataaataaataaataaataaataaataaatagaaaatgctcttgttagagaagttcctgccccacgtggacttctgctgataacagagcatggagctgggttaatggttgtgctgctgtctgagagctggcagagatgcacacattcaccttacttgtgccagctacttcccccattcccctaggctttatcagtatttactgcaggggcattcattgatttattcagacatttatggagtgcctgctatgtgccaggatggagctggctacataattagtaggggccagtgtgaaatgaaaatataagactcttgatcaaaaagcaaaaaaaggtatcactaaaggtacgaaaacattgtttctttttctttcatagtctctctttttgtctctcatcatagagttttttgttatttagtgtccttccaagtaaagaaacaatgtttagcatgaattttactgttcatctttatattatacgcccgttaagaacgcaaatatagaaggagttaactcatatatggaatcattgaaaacacacacttcctattgtgtagtctgtacatggatatatatttcattcctagcagaagagttaacacttgtccaaaactaacaactgcctttatttcacttcttgctgtgctcacatgttaccaactccccatcttcggcttgctgatgattaaggaaggactgagaggaaaaggaaccctggagtgccctgtctttcccttcccttctataggatcattttcagcataaatggttggctaatacaggcgattaacacagctttgattgttcatgtttcttagaatggcattgctttctgagtctgaagcaagctctgacttcaataggacgtgtgtcctgcactgatgcaagttgcaagactcaccttgtgctcactttgagcctcactggagtcccacgttattgtaggtccattgtaggtaggtacaacctaaggagcagatactggtattaacccattttacagatgagagttctgggatacagaggtgaagggacatctttgaggtcccaaagctggtgaagggtggagctattttctagctgagataacccagcctcagagttcaaaccacccagttattgtttgagaagcaaagttagaataattggcatatcccctgaaaaaaagtgaaatttcccacctcataccatatacttctaccaacccccacaaaaaattccagtcttaaacatattaacacacattagaactacctgtggtgagtttaatccttttgtattaaaatacaaaaggactcaaatttttggaaagcattcatataattctgggctgggaaaggccatttaaaaaaccacaaaatcccaaataatccaagattgtcaaatttgtttacataaaacttcaatttccctatggaaaaaggcatgaggatcaagtcagaagaaaaatcgcagatctgggaaatatttgcaccctaattgacaaagtcttaatatccttcaagtagaaagcactcttagaaatctgtgagggaaaatcagacaccgctagagaaaaatggcaaaggtcaccaaacaggcaattcccaaaaacagattataaatgatcacgaaatgaggaaaaaaatgttttacttcaaatcatatgtatctattttacctccaacttctgaagatagagaagtcacgactatggccacgttggtgagagttttggtagagagccttggcttgtttggtgggcatgctttccatttgtctggaatgttcttcccccagatacctgcatctctccagccccagttccttcacttctcaaggaggtatcctggctctttcatctgaatggcccccactctcccagctactccccatcccttactctgctttttttccatagcttctatcatcatgtgacctgtagcttctgtatttgttcactgtccagttcccttctctagacgacaagctccaccagggcagggacttccttttgttcgcagctgttttccccagcaccaggaagagaatctggcacacagaaggtactccattggtatttcaatgcacatgaaaagaatggggatctaggctgggcacagtggctcacgcctggaatcccagcactttaggaggcattttagcagatcacttgagatcaggagtttgagaccagcttggcaaacatggtgaaaccccgtatctactgaaaatacaaaaattagctgggcgtggtggcatgtgcctataatcccagtaactcgggaggctgagccaggagaattgcttgagcctgggaggcggaggttgcaatgagccaagatcatgccactacactccagcctgggtgacagccagaatccatctcaaaaaaaaaaaaaaaaaaaaagggacctcacagtgcagtttttttggagggtgattgatcagtatcatcaattgaaaaatgcacgttagaaattacttctagaaatgtattttacagaaatacaaaaggcaaaatttatatgagtatatgtgatttatcgcctcctgtggaaatgatccatacagaagacttgcttgaataaacttggggtacaggcatacaacagaaatacaagttttacagagcttcccaatgaaggatgtataaaggaaaaacatgaggtagctgtagctatggctgtagatatagatagctatagtatagatacggatatagtacagatatatctgtactatagacatggatatgaatatggatgtgatgccttcaataaatggtgagagtttattccagaatagtgcgtatagaatggttccactttcacaacaggagaacttacacaaattgggtacacatagaaagaagtctggaaggacatttaacaaatgaaacagggtttgcctctgagagatggatgggaaactttcacttcatatttgcttgtttaatttttataattttaattcaatgagcatgtgtcactttttaattttgaaataattatagactcccaagattgcattgtttttgtaattataaaatgcaaattgggtttaggagaaatgtcgggtggggaatggaaaaggctgtgactctattccagtagaacagacttgacattttgaaaagcagaggatggttctagaaatgatagctgggtctgctcagcattggccttcaccctccacatccttcccctgcaattggcacaggggcagtggctgtttggaggggggatttcaaggtcctcttttgagggtatgaggctagggagaacagcaaggacaacaggtgtggccagtgctggcttgggtcagcacagaacgggagttgtgccagtccatgtatttttacaaacatgctttgactctctcacttgcttgtgccatttacaccctgagaatgtagtattgcatcctgaatataacaaccgcattcaacaaatgttggtcaatgattgtgttcgaggtcaaaatgcaaaccttgtaaaataaacttcaaattttatttgtatgtaaaagttttatgttggcataatcttacacgacatctgatgcatgaggtatctatgtgccaaattattataaacaagatttgcacggtagggagcaaagcttgaatgtaggactgtccatagaatacaatctgaacagacacagttctgacagtgggccagatcgagggcaaaattgagccattcattcagcagatattgactgctctgtcccggttgctgttctagggtttgaaaatatagcagagaatagaagacatgaaaatccgttgcctcatagagcttccgttctaagctggggcagggaatgaaaacaaataacataaatggcggatttcataaattctgaaatgcagccccatcccccattgtaatatctttgaaactgggataattttgcagtcgatggaactgctgctgtctcatgcctgctcatggtgggggcagtagtcaagttatggttgtcatcgcatgttcctgtgaaatcatcattaaggtcattcagatggctgttgcttttgttgggctgaatgcactgttagaattattatgtgtgggaattttaatttccatttaagatatcttaacgctatacccatctgactcagcaatggtactatgtatgcagaagggcaggggaacagacagcagggcatttgtctgatgttagtgaagccaatgtttatcattggagtgccaatcataattccatttttttcttgtaaaccaacacctatgtactttgtaagacataagcaaggaaggtactcaaggaagatgcaactgcgttgcatttgattattgagataaatagtgcagaacgctcgcttaccattagcccatcagcatgagtaaagacaagggaaatgatcaaatcccttggaaagatgaaaaaacttttaaaacattgagaggctgatggaactgattcatttggattcaggacaatgctactattgttaaggcttcatgtcatttaaatggcatttttgttttcactgttagtggtacataaaataatggtgtgtctcacagcaacaggcatctcaagagacaatgaaaaatggtgatgtgacagaggtggtaagtgctttggggaaacacagtgcagggataacggggaagcatttgggggattgcaattttaaaagcgcgatcagagaagaccttgttatcattctaattggtgatgttgttgttattacaatattaaggccaaggttatgtgccttatagggaatcttgctactcaaaatgtggcttgattggtcaagataattttagagacagctgacactaattttgaatgcaaacggaaattctctgaaacattgatgaatgcttctgctcgctttagggaaattggcagaaaggatatctttggtccacatttcattgaattgatatattaagtctcagcccagctcacctaaacaccatctcaccaaagttttatctatcacacagcttttacattttgttgggttttatatacttaaagtttgtcaaggtatttaattaccttatgtattttacttttgtaatctaatattttaacactgggattttactttcgaccattgctcagtattacaggaggtgcctgcaaacataccatataaataatactgttgccttaacatttttttctccatgtttcaaatgcttgcaaaaatatcataatgactgtctaaccttccatgaaataggcataccatagtttactaatttgatatttagagagcttactattatagataatgttacagtgaacatttttccctgtcatttttattggccctgtgggcaaatgtggtcctaaccacactgcattgtgcaattagactatgagattcttgtagctgagggctactcctgacacctcctagcagaggcccaggaagtggtcaataaatattacaaagtgattgataggttagtgaacaagtggtttgaaaatctcaaccaaatagtaattgactctccaaaaactcctgggaactcttccgcttaatgttcttgctgacaacctggatgaaggatttgagaatctgcttcattaaacatgtagatgatatttaagaggcagcgttaatatcctggaagacagaaatagaattcaaagagctttgaacaactgaggaaaatgatattctaaaaacagaatgagatgaatttatagtgttttatgaacaaaaacagtggtttccacgtggagtgggaagaacatgggttcaaaccccggctctgtccctccccagctgtgtgaccaatgacatgtcacagctcactgagccccagtttcttcacctaggaaacagataatgttaccccccacagagttgttgctggaaggaccaaacgagtttatatacgtgaagggtgtggcacagttcttgcacatagaagggactcgataaatgtcacttaattttaataatatccccaagtgcccagaaaagagccacaacaaagctcatgcaatccggaggcaggataaaagaggatggatcagacaaaatccccccaaattgaaattgggggtgatggtcattggtgactgtccctgaatggagtcagcaagattctgggggcgtgttccaaagatcgtgatgaataaagccataccctgcaccaggcaggctttcagtggaattccaaaccctgctttggtcacttgtttaaaaaaaaaaaaaaaatgctaagacatggataggggcccagggaggtgtggccaagatgactaaagagattgaaaatggttcctgtggagaagaaaggagtttgaagaagttggagtaactcaatcactgaagccaatttaaaaaatatttttaatgcatatattaacacatatatttaatacttgttgaatgtgcttacctcaactgtcggcccctgaggttataaagtaaataaagtatttttcttctttttcttttcttttttttttttttttttggagacagagtcttgttgttgcccaggctggagtacagtggcgcgatctcggctcactgcaaccttccatttcctgggttcaagcaattctcctgcctcagcctcctgagtagctgggactacaggctcctgccagcatgcctggctaatttttgtatttttagtagagataggatttcgccatgttggtcaggctggtcttgaactcctgacctcaggtgatccgaccacctcagcctcccaaagtgctgggattacaggagtgagccactatggggggccaactttttacttgtaaataaagcctttaagatctttgtgtgccagtatgcgaggattatccttatctcttttaaccactgaataattttctatttaagggatttatttaattcccaccttctcacgcctgaagggtattttgaagtgcttggagagattgtttggttgaatgggaccaagggacactcctaggaatcaggtgctccatctcaggaatgaaggtcagcagagcctgttatctgtctttccagggggctacatggttgcccacttctgctgctacctgcgggcctgctcctgtctctggcttgatttccccagaccgtgggaatgcccagggcccaagcctactcatctcaatctcaggcccacctgggtctgaccaacaacatccctctcctcctctcccagagttgaacaagagactcaatctgattggctccaggccagccaatggattttctggctttaagtcaggtgcctacctttagtccaatctgaaggagctgtgaggagtcacattgcttaatctgctcaaagccctcagtgatcacttcattaatttattccagctgcttctagccgctgcagacatatgagtttgcaactttggccttctgtgtcagtgcttcttaaacttgaacatgcacatgaatcacctggggaccgtgtcaacatgcagacgtgggttatagagaaaagtctttaatgccttgtcttacagagaaacaagacgcagtccttggccttaattctgtaaatactactgacaccaccaattagggcaatgacaccaataatgacagttaacatttattgcatttactatgtaccaggcttcactgatgcgttaagtcatatcatctttagctacctttttagagaaagcatttggatagctccctttgaaacatgcttagagctggattccaaccaggtctgcctgactccagagcctgtggtcttatccaggtaaggggttggggaagggggacataaaaattccagaagactgagaggcccaggcaggaaaggttgtgggagtgcaagagaggaagtgtccctctggcctcggacctggagtccaggaacaaacttcctaggaccactttgagggctccgtgacatgatgtctgtaaataacaaaccacatgctaagccagcgcatgttaacaaagactggctgcttattattaggaaaacacttgcagctattaatctttaaactggagcaaaagctcatttaccatcaacaaatattaaactccaaatggctgtgttttctgctggcaggcattgtaggggacagaggactgttactgctgataaggaattgacaagacagttgaagggaatcatttattattaaattgaaatttactagtaaaagtattaacaatgtatcaagcagctgttacaaggatagcaggataatacttactgagcacttatcatgtaccaggcagtattttaagcctttgacctgcattaacccattggttacaacaaccctaagtggtaattactattatccacatttttccaagcgagggagagagagtcagagaggctcagaggcttgcttaaagtcacacaggaaggaggaagcagagctaatacttgaaccttggatcttcctgactctcctgctcacccacaccacctgtgccagatggagacaccataagatgggatggaaccagaggctgagtcacatgggacccaattttcagaaagcacctcctgggcagggatgtgtcttgttcattgttatacacagagatcttgacacttgtacaacggtttttagaaaatcttgaaaaaaaatatttttgaaggaaagatgagatccatagtgaaagagtcaagaaggacttcttggaggaggaggtttttggacagacttgaatgatgagcgctagactgagcagaaaagacagccagagagagtttggcttatcccagggttgcccaggagactggcaaataagaaaaaggaatatttttagatggtcagagagcatagtggcttaaaaccaaatattccctcatcttccccacctgacttgtgacaagtaagggaggcactggacagagtccctgtgtactgagcagccttccttattgttctcgcctgttccctcccagctggtgtgtgtgtattgggggtgcgaagggtgcagcccaggggtgcgttgattgcagagatagaaataacttcagcaaggaaggtggaagagtgttagacatttccctccctcggtccgggagaaaaatgctcagccaacgaagtctaagtagtaaaacccaaatccatccatcgtcctaatgccatgcgtgaccctagagacctctactcaagcttgcataatattgtttgagttagaaaagaacatacagtgatactattgcccagatgggctcctgctgagtgtcgagttgaacacacacagctggttaacgacccaagatggaggagaaagatttccttcctggcagtcggtgcagctgataatctgatttttttctcccaggcttcctttctgcgactgcctaattatcctacctactatgattatggattcccttcatgagggcaggggtggcctgcttgtgacaatctgggaggagctggctgtactctgtgcctcagtcaagaaactgaggctctctcctgttgcgggaagtcagggaccccatctccttttgtgggttttgtttctgactcactcagtgacctcctgtaagggggagtctgtttctggaatattgtcctttcattcttggggggatcaatgtttagtgtctgctggatatttggaggccccaggtctcttttgattcatatgtgggactgtgataaggcccaggtactttttgtttctgtagtaattgtgtttctggcattttggattcaagaatccagctatccctttttttctttttttttttttttttgagatggagtctcactgtgttgcccaggctggaatgcagtggcgcaatctcggctcactgcaacctccacctcccgggttcgagcaattctcctgcctcagcctccaagtagtggggactacaggtgcccaccaccatgcccagctaatttttgtatttttagtagggatgggtctttgccatgttggccaggctgatctccaactcctaacctcatgatctgccaccttggcctctcaaagtgctgggattacacatgtgaaccactgtgcccagccagctatcccatttggacatggcctgtgcctgctctgatgcctctggagcgtgatctttcactagtagcaacaagatcatcataaaaatagctgcaatttatcaagcatctattaagtgccacatacctcactgggaactttgtctcatgtaatccttgtaaatactcatccacagagggattcctgggcagagtaatactcagcagcatttgatctggaagatccgggtaagtcgtctgggctctatggtgtgcccggacatggcagcatcatcacacttatcctctccacaggtctgagaaccgggtgctccttgcatccctgtcttatagatgagaaatcaaagctcagggagcataagccaattgttcaatgtcttttggctaacaagtggcagagttgagacttgaacccagcaaggtgccgtggctcacacctgtaattccagcacattggaaggccgaggtgggcggatcacttgaggccaggagttggagaccagcctggccatcatggcgaaactccatctctactaaaaacggaaaaatgagccgggtgtggtgacttatgcctgtaatcgcagctactcgggaggctgaggcatgggaattgcttgaacctgggaggtagaggttacagtgagccgagatcacgccactgcactccagcctgggtgacagagcaagactctatatccaaaaaccaaaacgaaaaaagacttcaacccactaggtctgtttgcctccggagcccccgctcttacttgccgttctgtcttcctgttaagtcccacagccagctggtccgatgaactcacctgtagcaatgtgggctgggggtgggcagcgacgtatcccacctggtctctgtgggtggccacgctagggactccccaggggagctaggaggagaaagagcaagtcctgggcctagttggctttttcccagcttctaggtgggctaagatgacctaggaggggcccctgcgaaatctggtcataaaaggggatgattgctgggcccacgtgactcctgggaggacatggacatttccaaggacaggagaatttattgagcatctgccgtgtgctgggagtattatctctaggatctcatctaattttgacaacagcaatgcaaagaaaagtgtcctcacccctgtttgaaacagagaagactgaggcttagagagaaagctatttgcccagggtcaccccagcagtaagtgatagaactagaaagggttcaagtcccggcgagtcagcaccttcccctcacctcttcccctatcagtcacacccaccagccctgcatgttcatcgctgtgtgtgacaggtattaatgatgtggaaggtggggcagagattacaaaacagcagcccacagcttggacccagtccacagatttgctgtttcgtcccattttgtttaagatctactttacatatggttaatttcaggctttttagcttttggtcatgggatctttggtgaacatcccattgtgcaaccatcaccaaggtgcagagtgttttcaccatcccccaaattccctcctgctgcctctttgtggtcaagctctccccgaccctcagctcctagcagccacttcatctgtttttgggtcatacagttttgcttttgcaagatggcttctttcacctgtggctgaatgcacttgagattcatgcaaatcattgtgggtgcctcagagtggctgcgtttccccttagatgggtgtgtgtcatcagttcaccacagtccccacctggtcttcactttacctgcctgttccagagagcactggagtctgaattcccttggtggagtatttgacagcagcatggtttttggaggcacatgacctgggtttaagtcccagccttgactgatggtaaccccatgaccctggcccctgtgactgcccctctccagacttcagtttctccagcgataaaatgggagcgatattccgacctgaaagagaaattggtgaagatttattaaatacactaacacgtggtaggtacctctaaccacgcttggcacctcggaggtgatccattaatatcggctcttgtcatggagtttgttgagaggcactgaggcctgttcagaggtgcagtctgcacacaggagcaaatggccagcttgggtgggatgactctagccacttactaaaccacgtggtgtcctgccctgtggggaacattgatacaattgccatacatcactccctggtcttagggcacaagcgggatgttaatgaacaaaaaaagcactctcattggcagcattattcatcatagtttgctggctgcccaggtctggcctcttgtttcaagtcacagctcgttgaaaacattaaaaaaaaaaaaaacaaaccttgaggctctcatttctgtcctttcctcccatcttagcttttgttaatcatgtccccaaagaccttttaaaaaggagaaatggcaaatgatctggcttttccaaaccactggtcatctctggtatgaactgtttgtatgtttgagaagctggaattccacagatgattgatgggcggggaggagaggtgtagaattatccagagaagcagaggagggggtggcttgaagctggaattccacagacacttgatgggcaggggggagtggtgtagaattatccagagaagcggaggagggggtggcttgttctctgcctcttttatgcagcagaactttcagaagggaaaaagcgtgggtgttgggaattcctaatggcaagaattcatggaaacgtcatgttacatatctgccgctgtgggtgctgagcagagcggcagatggggccggcgcggaaatagtcatattccgccacttcctagtgtgccaaacactcatcactcgcgtcatctccctggactgtcacagcccctttgtgaggaaggcaggaccagaagtcacatctcattttgcaaattccagaaccgagactcagatgccaggtgacttgcccagggtccccacatcaagaggcagtgacatgagtggtcctgggacttaagccacagtcttctgccccttgctttttctgctatagcacgggttgggcctgtggtgtgatttgaacactactggggaatctgtatggggttatggcctgcctgtcctgcagcaaggttgctggaaacttccttggggtcaggtctgcacctcatgcattgggtatcactcccttccctgcttcccttggtgcctagaactcattcgacgtccaatctcaggcaaatgccttcttatctctgtgtcacctctgtttcctcatttgtcaaatgggcataactgtcactgttcatgtgctcaacacacaggacaactcttttgtctctctctcttttttttttttttaaatagacgtggggtctcgttatgttgcccaggctggtctcaaactcctgggcctgagtgatcctcccaccttggcctcccaaaatgctgggactataggcatgagccaccacacctggcccaggacaactctgttaattgaaccatcgactacccccctcttatcattgagaaggaaccattggattggcaacacagaagtcactggtgaccttaactaaggctgtctccttgtgaatggggaagaatgcccaatgggagtgggcccaagacacaatgtggggaggcgaccaggaggcagcaaatagagtccgctgtgataaggtgttcatctgtcaatgggatcagagaagtaggatagtagctgagggttcacatgggtctggcaaggattttttaaatggcaggcaaagctttcagctggaagtgagaatgcagagttgggctggagaggaagaggagcagaaatagcctctaagacctaatttttggttactgtgaagatgaaaagatatgacctacagaaagcatctggcgttgcttgatttggtcacagagggaaaggaaaggactgcctgggattttaaataacatatcacggtgtgttagtacacatttccatctaggcttcccctgttgctaaggaataattaaataatttaaatacttttaaataattgagagattcccagaatctttatttcagcccagtatgtcccatgcatctgtgcattttggtctgtgcgtgtgttttgatagtaaaaggagacatgagagtctctctttccagatgagtccagtcctacacaccctccccaggacgccaggggtatctggggctttttcgtttgctggtgaccaaacctgtccctggcttccatcttcagttcttcccaattctttaatcccttagtccaggctttgctccctcccttcccctccagccgacccaccacccccgctcatccaggtctccatcaattctcagttgatctaatagaagtgcctccccagcctccctgactccagtctctccctgcccctattcatcctgcttagtaatgttgaaatccggcattgctcgtgctgctaaagaacactagtgtctttggttctgcaagcataaaatataaatgaccaggcctcagttcacttcatttccccagacatatgctgtctcggagaaggcagatcttgttgttctcggaacaccctgagttcttttcattttaacttttttaatgtgttcccattgctcttgggataaaactcaaactcctcaccatgtcttttcaggctgatggcatctgcactctgcccacttttccaacaacatctcctgcccccatcaaagtaagcagttcgtgcctcaggacctctgcactggctgtttctttgtcctggaattctctgtcccatctcttcacatgcccgggtcttacttcagcttcagtgagactcctccaaaaggctgtttctttgcaagctattccactgctccggtttattttctgactgtcattttgttcacttgcttcgtggaatttgacacaatttgaagtggacttgctgctgtgtcatctgtcctcccactgggtgccagctctgtagggcaggagctcttccctctcttggccactgccagctccccagtgcctagagcagggccccgaccgagtgggagctcagcagtattgttgagtggatgaacatcccttgccctcgcccgtcaccgcacccctgtgcaatctgtcctgtctgttttgttcactactgtgcccccagtacctgagaccgtgtctggcacataatgtttgctcaatagataatccttgaaagacaagttgaattaaaaacgcacatccagccccacttgaccccggaattcagccttgactgacttatacgttgctcatttcctctcgggttcatcaccaaatggggctcttttcctgctgtttatgaagtcaccaactgcagatacttgagaagggctccaccggtttttgttttttgtttttttgagacagagtctcactctgtcacccaggtaggagtgcagtggcatgatctcggctcattgaaacctccgcttcccaggtacaagcgattctcctgccttagcctcctgacgtaactaggattacaggcatgggctatcatgcccggtgaatttttgtatttttattagagatggggtttcaccatgttgttcaggctgatctcgaactcctgacctcaagtgatccacctaccttggcctcccaaagtgctgggattacaggagtgagccaccacgcctggccaccgctcataaacttccatgagaaaagcagtgttagctccatcttacaggtgaggaagaacgaggccagggaatcctgtaacttgccctccagccccgtaattgctgagaggtggagtcattcatttgtggagcgtgatgttgccttggtgttgctgctgggaggagggaacacatatgagcctgtgagtctttgaaggggagttccaggcactccaggtcccacggagacagggaggttcctggaaatgaagcttacgcttgaaggatgagaaagtatgaaccacgcatggtgtaggtgtggaccgggagtgaaaggcgttccaggcagagagaatggcgtttgcaaaggcctcaagcctcaagagctcagggaccgctggggggaaagtgagcagaggagaggatgattttttttttttttcccgacagcaactttccttttcatagccaattatattaagatagaattcacatgccataagattccctcctttaaagtatagaattcaggagttgttagtacattcacagtagtgcagacatagccactattaattccagaacatttttcggtatcccaagaaagaaaccctgtgcccattggcagtcacactccgttgtgccaactccctcaacccttggcaaccacgatccgctttctgtatctatggattggcctatctggacatctcacataaatggaatcgtagtctttgtgactggcttctttacttagcaagtgtgttttttatttgtatttttttaatgtagtaaaatacatgtaacgtcaaatttaccatcttaacttggtggttgttactatcattgctcaggctggagggcagtggtgcgatctcagttcgctgcaatctccacctcccaggctcaggtgatcttcccacctaagcctctgaatagctgggactataagtgcatgcatcaccgcactggctaatttttgtattaactttgtataaattttatagagatggggtctcaccatgttgtctaggctggtctcgaactcctgggctcaagtaatctgcccacttcaggctttcaaagtgctgggcgaacaaatatctgttccagtccctactttcagttcttttggatatatgtttacgtagaagtagagggaggatgactttttaaagtaaaagccctcctgccattttcttaaaaatgtttcccctaggacagcttgccccgtcaaacaaagtgcccccttgtagcactgtttaattaaatgactgcaaccagtgtaccgtgtgcacatccaggaacgtgccatgtgcccttcctctccttcatagagctgggaacacttcgtggttgtcgcttagttggtctggtgagatgagaggaatggctctgtgttgacggcgctggccacttccaggccttcctcttctaagtcagggctgcatttggcataaacgggttctagcagtcgaacccctgttatcgcaagaactgcctccgtctgttttgcattgctatgaagcaatatctgaggctgggtagtttacaaagaagagaggtttatttggctcactgttctgcaggctgtacaggaagcatggcaccagcatctgcctctggggagagcctcaggaagcttataattatagtggacggtgaacggggagcaggtgtgtagcatggtgagagagggagcaagagaaaagggaggaggtgccgggctctttaaacagcagctctcatgtgaattaatagagtgagaactgactcattaccgcagggaggacgccaagtcattcatgagggaatccacccccgtgaccaaaacacctcccaccaagctccacctccaacatcggggatcacatttcaacatgaggtttgcagaggacacacacccaaactatatccaattcatatttattatgtccttagaaagtgctgggctctgtaccaagcagtatatgtgggttattcaatcaacgtgatacttatgacgtgtgtaagatgattcccactttacagttgaggtcactggggcacagagaaggaaagtagtttgcccagggttacagagccaacgtaagagccacagttttgagtgcgggcatcctgcctctagatctcatgcccttgtccactgaaataagcaatatagcaggctgttgaagagcccaggcttagccatttgcgagccctatgaccctggaaatattgtttaacctgtctgagcctcagtgtgaccatccataaaatggggacagtgctgtacccacttgaaacgattatcctgagagttcaatgagatggtgtgtgtggagctggtgcattgggagtttcactaaatatcagttcctgtcgcagggagagagtcagggttgagcagaccagcttatgtcctggctggaccttgggtattagtgtgattgtggactgttcttcaaagctgaggccagcatggggaacatggtttaatgatctcccgcctgggcattcagtatccgggagcttggatgtttgcagaggctgctgggatggggagggaacttagaggctcctcgatagtagcacacgtccttgctgcaaccctaaataattgcttttctcccgaggctactgcttgctctgcctggggtaggagccaggcttgggacttgtcttggtggcccagggctatttcattcaagttggtggactctgattttaattgactcttgtgtgccttgagaccattttccaaggaaaatggatcattaagcctgagtttgtcctcagagaagttccaaatggtctatggctcctgggtacaagcaaggatcatggaaagtcgttttgtgaagtctcagtgagatgtgcttgttctggacactgagttctggtcccagggattccagttctctccagctcatggtggcaaagagcctgtctgatggcactggtgttgaataatctccaccaaacacgaggggcaaatttcaaggatggcttttactcagcaggtttcttggacaggctggcattgctccttcccctttgaccctccaggataacaagcatggaccacggtggccttgacggaaatcctaacctagctaaagaccctctccctgtcactcagtagctctttctgtgtatgacattcccttcttttcttaacccagagagatcctgacattccagcaaaaccaaaacgaatcaaaacactagtctggcatccttaaaacagcattttttcaaagtgtggtccattgtccagcagcaccagaatgactcaggagtagagggccactaaaacattaataataaacccccaagccagactccaggtctaccgaattagaatcagcttagaaatgttgctttaacacaggtgtgttctgtggctcaaataccacaagcgatgttgctgacagggacatgatttgatgaaatggtgagtaaattttggtaaaattctgagcaaaagaaagtacaatactcgcttgtttacatggtaatgggagttgcattcctgggagaatcatgtggatagaaaccatgcccagaatactttgtgcagaacggattcagacttggcctcagatacttctaaacatgtgttttacttggggagtatgggggacttggggcaattctcttttccgcaggactgtgatgtgcatggcagggcagtcgatagccctcgcgctcaccctctaaatgccaatggtgcccctaaaatgctcctgtgaattttcaaaatgccctattgggggcagttccatttctgttgatgcccactggtgtagtggaaaggctgggcttagtatgaaccctccactgataccctgtgtcatccttgagtcagctagcctcaccgaacctcttctctctaacatggtgggatatgccaggcatggtggttcacatatataaccttagcactttgagaggctgaggtaggaggatagcatgatactagcctgggcaacatagtaagatcccaggtctacaaaattaaaattaaaaaatgagcaagtgtggtggtgcatgcctgtagtcccagctactctgggactgaggtgagaggatcgcttgagcccaggagtctgaggttatagtgaactgtgatagcaccactgcactacagcctgggtgacagagcaagaccccatctctaaaaacaaataaaacaaaaataagtaaaataaaatgggggaaataataaaccttccctctaaagaattgtttgagggttaaatgatccaatgtgtgtgctatccctaacacagcaatgggcacacagtccaccctgaatacctgttgttctttgctctattccaggttaaacatgttctataaaggaccagataacaaatatcttaggctttgggggctatattgccagcctctcttgccacttctcaattctgccgttgttgcaagaaagcagccatggatgacacgtaacaaaggtgcagctgtgtgccaataaaactttatttgcaaaatcaggtagtaggccaggtttggcctgtggcctgatcccgggtctatacccatggaatgtctgtgtgctacttctccatctgctcagctggattagagtctccctagaggcccatgttttcagttttgtcgtaatacatctggaacaagagggttatcagactgtgtctggcgcaggtagttcccacaggcagttgcaggagatcatgatgtatcgacaaagcatcacctctgtcctcagctaactgccttcagggacccgttcagtgagagaggaagggagcagagagatctcaggtggagagtgtgggttaggcagggccggcgtccctgttcctgggggccaagcctcctgtatagcagatagcacattcccagggtttctgagcatccttggaatttcagagggaaatatcaatttctcctttgtgttaatttcctaaaaaagaagttatccagcatactgaatggaaccctggagttgttgatctcaaagaaagtgttatctgcatttactgcccctgcggcaagttttagagtttcccattgaaattttggaggtgggcttgggagaagcagaaagagagagaagggaaggtagtttgaggcctaaactggcagcctgccggtcagcttctgcccaaggacaagtttgttttgctactcacaggaacggtctgcctgccttaaaaaaaaaaaaaattaggttcccataataatccatcttttgagcttctctgaaaaactggcagcctcagggactccaggactgtcttctgcagggcaacaactgacgggtgggtgggagccaggggggctgtcttgtcaggggtgcaggctgtccagcaactaatgctcccagaccctcaaccttgtccttcctcctacctgctttctctacagggcctctgtgggcatgtgggtttgagacgtctgcctccctaaggaatggtaaatgaggtctttcattagctgccacactgcatggaagacaagagggcagcctggccaaggccacctgggccctggaggagcctcctgcctagactccgtgcctccctgcctccctgcatcactccctacatcactccctacagttggttctccatggagcagatagagggattggtctaaaaatgctgattagtcagctgctgtttttcattgcttttcagatcaagatccaaccattaacctgcccgcagggccctgggtggattgtctttgccaatctccctagttgcctttctccccttatcctccttacttcctccctcaaatgccatgttccagacaggttgagctgctttcaactccttaaacagcttgttaagccctttcatgcctttataaacccagatcttacacatacaaatttgcagagacacaggcatttcagttatgattgggttgagctcaagttgacagaaattcaaaacaaggaaaagggatgcttatttctctgctgcaattatccgagtgcaggaacccagggctgggaggtctggcggttctcagagtcaatgccatagacaccttgactcttgccctgctgtgtgtggcctcttgacccagtatggaagcatgtgaattccaggcccacgagacagagaaaggaatggcgaggaccaaggggacatgcacaccatctcttaaaaaggcttccggaagaggcctgatataactctacttctcactaattctggccaatagtgcagggccacgctaagatgcaaggaagcctgggaaatgtagtcttcattctaggaagccatattcccagccaaagtttagtggtctgttaccatagaagaaggcttaacaactactgcataccagaagggactcctataatctcaatgttctttgcccaccagtattgtgaaaagcagaaattggatgcagaattatctgctcccaaaactgtgctcttcactgttttgctgcgttgcttcctgacacgcaacacacagttaggatttaacaaaagctcatagagtattgagttatagattttgggcttgggcatgcttggaaagtattggtctgtgtgtacagcccacttcattttcttataaggagaatactagataactcttagaatttattaaatctgaccgggtgtggtggctcacgcctgtaatcccagcactttgggaggctgaggtgggcggatcactggaggtcaggaattcaagaccatcctggccaacatggtgaaaccctgtctctactaaaagtacaaaaattagccgggcgtagtggcacccgcctgtaaccccagctactcaggaggctgaggcagaggttgcagtgagctgagattgcgcctctgctttccagcttgggtgacggagtgagactccatctcaaaaaaaaaaaattattaaatcttagaactggaggaaatggcttttctttttgaaattttattgactttattaggtatgatgcatatatcctaaaaggcacacactttaaatatgagtttgataaattttaacaaatgtcaaccctcttgtaaccatcatctcaatcaagatgtagaacatttccatcattccagaaaaattccccagtatcccctggtggacaacccccatcccccaccttactccaggcacccaccaatccattttccttttttaaaaagagagacagggtctcatcatgttgcccaggctggtctcgaactcctgggttcaggcaatcctcctgcctcggcctcccaaagtgctggcatcagccaccacacctgaccaccaatccattttctgtcattatatgttagttttgcctgttcttaaagtttatatgtatggagtcttaccacttgggctctttctatcgggcttttttcgttcagcattatgtttcatgcataattcatgttactgcttatactggtagtttgttccttattattactaagtcatattccatcttatatctcaaactgctgatttctatttattgtttccagttattggctattatgagtaaagctgctatgaacattcacggacaagcctttctgtggacatatattttcattctctagtataaatacttaaaagtgaaattgcttggttatatgataagtatatatttacctttacagtaaatgctaaactgttttccaaagtggatttaccattttacatttccacctacaatgtatggaagttccagttgccccacatcttcaccaacacttggtattgtcaggtatctttaaaacttttgctattctaatgatatatggcagtatttcattgcagttttagcttgcgtttccctgatgactgaagatactgagcatcttttcaatgtgtttattggccatctgtacactttcttttttgaagcgtctgttcaaatgttttttctgctattggtattttgtcttctcattgagttgcaagacttcattagatattcaggatacaagtcttttgtcagataaatgtattgtgaatgtttcctcccagtttgtggcttgccttcttattttcttcatgggaccttttgatgaacagaagtttctaattttcattaagatcaatttatccatttcttcttttatggttggtgcttttatgtcatgtttttaaaacatactatgcacctgctgtgtagataatcaggaaatgtttgagtggttgaattccatcagagtagttatggtgcgacaacctatgaagagatgacctccctggactctctttggtatttggggtccatgttgtatggctgctcctaactctggtcccctaacacactaggagccaggctgatgaagagcccaaatcagtgtgtttgtgtgtttgccgtggggagaggggaggagagaactaagtccttttctttgccgaaacactagggggaaaaaaaaccccgagcaaatggttttcatattcactgggtgatgtttctacagttgccttcctggcctgatattcttggggaatgttgcttcataaatattgaatggcgtcggtaccttctgcgcaggccgccggcaactgcttcctagaaatgaatttggagtcttgcagtaattacccctggaagtgttcattcaagtctgagagcagattaaataatgaataggaatgtcatttattcattccaatttagaaacccgtgtctcattatttttctggatgaaattgaatgtcaagaaagggagaaaactaaagggaagggggagacttggagatggaacacgaggcaagtgtgtcactcgtactgcagaagaccagagaagggggcttgggtggggaagtggcctcggctcctccaagaactgatgccagtagcagggttgtgaggacagagcaggtcagataggcaatcagggacatgcccacaggcccttttgtccttgctcctagactatcctcatttctcacctttttgacatttttcccttggagaaaaattgtaaaatgcaggaaagcgttaaagagaaaaaaaaactcatccatcgtcctgccacccaaaggcaatcattattagcattttgcagtatttcttttcccagacttttttctctgctgagcttttttgaaaaaatgtatcttgagaccagagtaggaatccagttgtacctcctgcagtgagtgttggttcatccttaggatgcaagcaatcttggatggggttgcacacactctgtggactgcaagctccctggctcttggactcttctccatcgctgcacctgcagtacctagcatggtgcctggcatgtggcaggcattcggtaagcatgtgttggatggatgggtcacttttagtagctgagtatcaatccttagtaacagcagccaggaggacagggtgcttgtggggtgccacacgcatgctaagagctttacagggtctacctcatttaacctgtacatcaccttcctaagagatttattttcatggctgagaacacagaccctggagtaagtctggcagtatagtgtcatgcttgagaatgtgtgctttggagctagactacctgagtttgtgccccagatccattgcttttagccacagaacctagggtaaatcacttaacctttctgagcctcagtttcttcacgtataaaaagactctaataataatatctaccttgcaggactgtcaaaagcattttgcgcaataactcagattgggacctggcaaacatttctaactagttttatttcattttatttttattttgagacagaatctccctctgttgcccaggctggagtgcagtggcatgatcttggctcactgcaacctccgcctctcaagttcaagctattctcccacctcagtttcccaagtaactgggactacaggcatgcaccaccacaccaggctaattttttatatatttagtagagacaaggcttcaccgtgttggccaggctggtcttgaactcctgacctcaagtgatccactcgccttggcctcccaaaatgctgggattacaagcgtgagccactgtgcccagccaggacatggcaaagagaaagtagtttgaaattgttagccgtaagtactaatcttcatcatctgagtaaccttgaagaagccatttttcctttgagaattagtttcttcatctggaagatggggagagtagttgtgatcatagaaatgagataaactatgtaaagagcccagtccagaatttggcacatcgtaggaactccccaaagaatagttattcgtagtctctcaaaaagcaggacctatccagctcctactcctccttcaaaacttacctcaagggtcacctcctccagatggcttccttgatttcttttccccctacttctctgcattccttcaatgctttgatctgttctctaacacaacaattcccatgctgtcctataatctcagttttaacttgtccatgtgccccactgtaccccaaacacccactaatcaccactgcatccccagactctagtgtctggcacatagtaggtgctctacaaagcatttatggagtgaaactatgattgatgcagtcggggaagatgttgggggcaggcagccagggggtgagtgcttctattgagtcatctctgaggggagatgttagtgaaagtcctggaaaaattagctgcttgtcataaattctatctctggtaatgttttgctaatctgtctttttctgacttaattcaaaattgaatgggagggagagaaatttgtctgggtgactccaagttaacaagctgtaatgatgtgctgggaactgtgtagcttggagctatcaatttgctggtagagagggcagaagtgaaaatgtaactgccattggtaggggttgtcaagggatagaggtgagaggattctgggtttttagtataattttcatacaatacaatgtgcccatttacttgcacaggctgagttttgacaaatgcatacacccatgtaaccaccaccatgatcaagatgtgaagctggtctgtcactccacaaagagtcctcttgctctgtgtcaccccctgcaaactgccttaggcaactaccatgctctttctatcagtataaatctattttgcctgttttagggtttcatataaatgtaatcatacacaatgtactcttctgtatctggcgtctttcattcagcataaatgcttttgtgattcatgttgtttttaagataagatttagttctgttgcatccatataccaatctccttttcccagataatccaatgccataggcttgtcagtcatgtgctgtgttcttaggctgattcttcaataactggcttaaatgtgctctcctctgacattccttccctgacttttccccagcattgctaactgggttggtgataatgctatttaataactgctatttaatgggtttttaaccatggttaataagcctttgccttacaaaggttattctattattacaatcctcctctgagttaggtatcattgtcccattttagaaaaggaaactaatgttcagagaggttgagcaactgagctaatactatacagctaagtaatagcagagccagagtttgaatccagaactttgaccttaagaaccgtgctcatgaccagtctgctgcagtgactcacgggggaccattctcttcatctatagcctgaacatccccttcttaaattccttatcacactgtttcatagttttctgtttcactgtcttttccctcttgtcagtctggcttcttagttgcaaataacagaatctactctagcacttaagcaggaagagaactaaaggagattacgtagctcacagcatctgcaggagtatcagagtcagcctgggaactatgcaaccaggaataaagctacagtttcactgaataccacagcctttgctgcccctgaaagccatacatcctccataggaattagattctctggacaccaatgtcttcatttgctcacttttttttttttttttttttttttccgagacaggttctcactctgttgtccaggctggaatgcagtggcgccatctcagctcactgcaacctctgcctcttggtctcaagagatgcccccatctcagcctcccaagtaactgggactacaccatgttaagtgccaccaccatgcccagctaatatttttattttttgtagagacggggtttcatcacattgcccaagcaactcctgcacttgaactcctgtgctcaagcaatccacccatctgggccttccaaagtgctgggattacaggtgtgagccactgtgccgggccatttgctcacttctcaattgaaatatcacatggtgctatctgattggtggagtctgtgtcacgtgatgaggccccagccacaaggaatgctgagagaacacgccgtgctgagagaataatgttgggtttttttggggtttttttttgtttgtttttgttttgtttttttggtctgtattcttacaatgtctttgtctggtttcttattagagtaatgctggccttatcaaacaagttgggaaatattctcttctgttttctggaggagattttatagaattggtattatttttttctttaaatttttggaagaatttgccagtaaaaccaactgggcctggagttttttttttttcttttcttttctttttttctggaaggttttaaactccatattcaatttcttttctcttttctttttcttttttttttttttttttttttttttgagatggagtctccttctgtcaccaggctggagtgcagtgttgcaatttcggctcactgcaacctccgcctccagggttcgagcaattctcccgcctcagcctcccgagtaggtgggactataggcgtgcaccaccacgcctggctaattttggtatttttagtagaggtggggtttcaccacgttgaccaggatggtctcgatctcttgacctcatgatccatctgcctcggcctcccaaagtgctgggattataggcatgagccaccgtgcctggcctcagtttctttaatagacataggacaattcaggttatccgtttcttcttgagttttgatatttggtatctttcgaggaactgtttcatttcatctaagttgttgaatttaaggaagtggagttggtcacagtattcctttattatctctttaggtctgtggcttcagaagtgatgtgccctctttaatttcaggtattgctaatttgtttcctttgtctcttttcttggtcactcttgctagagatttatcagttttatccatcttctctaagaatgagctttggttttattatttgtcttcattcttttctgttttcaattttattgatttctgcttttctcttcattatttctttccttctgcttcctttgagtttaaatttacttttctttctctagtttattgaagtaaaagctttggttactgtttttagctttttcttcttttcaaatataaacattttaatgctgtaaatctccatctaaccatggctttagctgcattccacaaatcttggtgttttattttcattttcattccatccaaatatatttgaatttcccttgccattttctcttgagtctcagtgagttatttagaaatgtattgtttaattttcaaatatttgggggattttccagctgtctttctcttattggtttctagaccagttttgttataattctggagcataattattatgattacaattctcttacatttgttaaggtttgctttatggaccagattatgatgaatgtgtatatcttggtgggtgtttcacacacacttgaggcaagtgtgcattcttctgttgttggacagagtgttctataaatgttcattagatccagttggttggtgatattgtttgtcttctctgtcaatactgattttttgcctatttgttgaatcagtcattaagagaggaatgctgacgtgtccaactatatggggatatgtctatttctcctttcaactctgttactttttgtcttgtgtagtttgatgctctgttactgggtacatacatgtttagaagtgttatgccttcttagaaaattgacacctctactgttatgcaaagccatttgatttatttctctccatgaaactttgttctaaagtcagtgttgtatgaaattaatatagttactccaggtttttttgtttttgtttttggttggtatgtttctggtaccctcgatgtatgtacctaccaagaaggcccaggggaagcagagggaggaatctctttttctaaacattatacagccaatgcctttgcagtggtgtcaactcagaaccttgtgcattgcaatatgggaacctggaatgagagcctccagtgacgcccagcactgccggtggaaccagcacctgtttgagattcacagccacctgcaggcactgttatgtctgtggttagagttctcagagtgagacaggagtggtgggtggccaccacagttttggatgctgttgtaccttggaagtttaatcactctgtgtttacaacctcttttcaccatggagaccatttgacaccctgggaactgaccttttaaaatggcatgtggtgcgtgcacaagaggaaaagtagagaatttagctgtaaatgcaatgttttaaaaagaagcacttttatactctccactgctgtgtaattgtgggatggcctggaggggaaggggaaacattgcaagattcaaatgttaacagatgcatgaaggacctgcaacattgcaagaaggacttacacaggcaattgggaccaaggtcattcctgaaggagtgagggtaaattctgcatcttggcatctggccgtctcataattattggtattcttctggagtttgagcctcaacaagggtgtagagggctacaggcaggggagaggacattaccaaggtactcatttatatttgatcaccaagaatagcctactgattctaattgaatataatcggagacagtcaagctggctggctgaaagctagccgactgtctaccttcagagctgtgggatgatgggaggaagaggcgtgagggttgggaggacagggtggagaagaaaggctttgtcagctcaagctttgctctgacccttgttgtgttggcagcaaaaacaagggtcagacaggcctgaattcaaatcccaccttagctgagtgacttagccattctctgtctcagcttccttatctataaaatggggataatagcctataattagagcatggttgtgaggattaagtaagctaatccatgtgagttagctcccttgtgttcttcctactcaaaatgtggtacatagaccagcagcatcagcttcaccctggagcttgtcggaaatgcagaatctcattccttctcagcatctgcatggcagcgagatcacaggtgattccaatgcatgttgcagtttgaaatgtactgtgttatgccaccttcatccttccacattgagcccattacatttttgagacaattggattttctgtggtccttttctaacattctctgagtgtgttccctccacccatataaaacaatactcaaaacacagagcagtttcaggatggcactttcttatagctttgagaagctctgacttctgtctggagtattaagatttcatccactccccacccacccaaacactgaaacagtcaggatcacttcatacatctgttaacatttgtgaataaatagcctttggcaacttagatcttattttttaaatgtacttaagggagtccgtcatttaaagaaaccctatggtgaacacttctgcaaagcaaataatcaccaactaatttattttacaagctcaattttttgccgattatgatttcagaacaaagcagattgagctgttggaagctttagctcttaattagcaatattaagaataataaatttttttttggtgtgggtaaaataggttgctttttccagtgttggtggggcatcagaatcacctgtggagctttatttttgttttttttactttgtaagtacataaatcttaagtgtattaatgatttttacatatgtatacatctatatagatcaagatatagaacattttagcactcctgaaagctcctgcatgtcccttcctggtcaataatacctccccagagggtagcctctttctgacttctgttgcatagactaattttttttctgttcttgcatttcataacaaaatcatacagtaagtattttttcatttctggcttttttcatccaccacgtttctgtgattcacccatgtggttgcatgttatagcatagtttgtgtaatattctactctatgcaaatataacactgtctattcctctgtagttggacatttgggttgtttacagtttcatgctattacaaatagtgttgctatgaacattattttacatgttttggtgaacttaagtatgtgtaaatactcaacttgagtacatatctaggaatggacatcctggatcacagggtttgtttatgctcagctttctttctgtctttctgtcttcctttctgtctttttccttcttccttcattccctcccttcatacatatacacagggtatatatatatatctatctcatatgtttcggctgtgtccccacccaaatctcattgtgaattatagttaccataatccccatatgttgtgggagggacccggtaggaggtaactgagtcatgggggtggttacccttatgctgttctcatgatagtgagtgagttctcacgagatctgatggttttataaggggcttttacccctgcttcgctctgcacttctccttgctgccgccatgtgaagaatgtttccttccccttccaccatgattgtaagtttcctgaggcctcccagccatgctgaactgtgagtcaattaaacttctttcctttataaattacccagtctcgggtatatctttaatagcagcatgagaatggactaatactctctctctctctctctctctatctatatatgtgtatgtgtgtatatatctaatatatatataaattatatatatataaattatatatatatataaattatatatatatatataaattatatatatatatataatcttgctctgttgcgcaagctggagtgcagcagtgcaatcacggctcactgcagctccaacctccttgggctcaggtgattctatcacctcagtctcctgagtagctgggattacaggcatacacaccaccacacctggctacttttgtgtattttattgtagagacaggattttgccatgttacccaggctggtcttgagcttgtgagctcaagtgatcctcccacctcagcctcccaaaatgctgggattacaggcatgagacaccacgcccggcccatgctcagctttcacatctattgttaaacagttgcccagagcagctgtacctgtttatagctcagcagtcatatgacaattcctgttgccacatgcagagtattttatggttacaagttcctggactcttcctagaacctataaacttggattcccttagaggttaggacttgggaaactgtattttcctatcaaacctcagtggttttgcagataaattgaatatgacagtctcaaatcacccaacagccatctaaaatatgctaattacccaccaaaataaaataaaaagttcaccttaatgaacttacctggaattttataacctggagaggagatgtatgtctgtgttttatgctttatttagtgttcttaagctgacacatattgaggaaggtgtaccacagtttgtcagtgttaggtcttccgaatggcttcatcaggccccgaactagtattttaaggggcactgggagggtccccccactttctgctccctaatttagcttcgtagcacaggagattctttcctttggattagcccagcccctctgagctcttaaagtgtaaacaccttttcaaaggatagcaaatagcctgtgctatcacgaacacaggtgtttgcaacagtttctaaaacagctgttctcaagcccttaaggcaattgtgtgtttgttgagagtgggagagggagggaggttatttttgcttgttacaatgagggagatgctgctggcatttagaggcagggattagggacactcaacaggctaccttgaaagaagcagccctgtgtggcaaaattctgtcctgtcccaaatgcaatcagtgccttccctaagaaacttccgttttcctctggtggtggaagggaatagctagttgctagattctgagctgtggagccatgaagctcgggcccaaacttgattttaccatttagtagctgcatgacaagtaacaacttctccaacttctctgtgcctcagtttcttcatctgtaaagtgggggaaataatacagcttacctcctagggggattatgaagactaaagcagtggtaacacaggtaaagagctcagacagtatcaataaatgttagccctatcattattattattattaccagcctgtaagtataaaagaatatggtccaagatgacactgaggggaaaaaagagaagaaagatgacttagagtcctcttaatcaaagtttaattttcaaaaagctaaagatatgttttttatgcaaacatatagtgatcatgtgtcagatttatttgactcattagtgaactagcagactcactggcttaaatcaggatgtgagagaatgaagtgtatatatatagtcagtgaaaaaatattggaataaaattgcaaagttaaatacttgtccaatagacacctggttaatgtcctatagaacactaaaccataatgtttaggttatctttcctactgggcagaaatcatatgtgtcactatgaataaaagttatttgcaaacttatctacattcgaacttttcagaaccttggcttcaatcaagacaaagcaggaagtcaaagctacttttctcctggagctgtggttctccaatttcagggagtatcagaaccccctgaaaggcttgttaaacagtttgttgggcccctcctacagaatttctgattaagtaagtctgagatggcgcccaagaatttgcatttccagcaaattcccagggtatgctgatgctgttggtacagggaccacgctttgaaaaccactgtcccagagcagtgggtaatccttaggcagaattgttcttgtatgattttaaaagagcaaacagaaattgccttatatctaagttgttgatcattttcctatatgcctcctcaccttcaagatgcaatttatttcttgactgattggccagtttggggtaaggtgggggattttggtatccccacttctcagcaaccccagtgctctgatttctatgatagtcttggataaaggggtaattagttgagacatgtctgttttcatatgttttcagtgtatttttcatgcaacaaaacagctggttttaacatatattagtccttaggcaaaagaaaaagaaaaaaggaacatttaagcctctgaatgggcttctctataaaaccgccttcctgaaacacaggctcctagctcacccagcccctcatggaagtcatgaccaggttatcctgattctctgatgaaacattaaaaattggttgtttctctgtttctctttctgagccccaagagaagcaggcaggctgggaaacccaaacagacctagaggctgagtcgagggcactgacatctcaaggaggcagcccaggatcattaactctcttttgaaaatgtagatgaaaaacaaagtcctgtgaccataaaggaagtcttttcttctcagttttctgaacaaaaatcatttcagtgtctaaaggtttttaaaagatttttcccattgctttatctttaaataccttcctgctgcaagtgacctgttaattttccacaatgtctatttctccccataactagaaagcctactttcctcctgtacatcttcccagagatattttcatctaaattgatggttcctgtcatagtaggcccagtgctcacgtttataacatatttcataatgtatgttttatcatcgtgatagaattaacagctaataagacctacctatacatacaatttcagggaagtgtatgtgtgtacatttgccctgagtgtaatgtataggagaaataaaacgagatggatttctcgttttacacatataaattttgaaacagagtcttgcccttgctgcccaggccagagtgcagtggcacgatcttggctcactgcaacctccacctcccgggttcaagtgattctcctgcctcaccctcctgagtagctgggattacaggcacctgccaccatgcctggctaagtttttgtatttttagtggagatggggtttccactaaaccccgttcagtttagggttccactaaaccctaaacagccaggctgtttgccaggctgatctcgaactgctgacctcaggtgatccacccgcctcggcctcccaaagtgctgggattacaggcatgagccactgcacccggcctctagtaaaatatatatgtcactgaacaaatgttcctgtaaaactctgagagaagataaaaagcagtactcctgctgacacccatccataacactggaaaaacaagacaacagctatgaatgcagaaagatccagatgtgtagcagtggccactcagcaccactggcatttctctaggtgatgggattttgcaaaatggtgaatattgcttcttaaaagtttaaaacagagaaatgcagtcccctcaatttatatttacatggtagttacatccctggaaaatccaggatttgttcaagtcttgcaaaaaatactttttacaatatataaaccagagttaagttctagcagttaatttcaaacaggtttttcacctacatgaatgtcaggtgcaacattgcagacttgtgtgggacttgggacaatgctttattgcttactgcaggccatataacatccttgttaccccaatcaccagtagagtttccccacaatttggtatttgatacctttctaggtttccagaatgctcattcatgctgtggatggggagtagatgcgggtagagaacaaaaatagaggtggggacaattgagctgccgtagtcattgaggtgagatgtaatgatggctggaactaggataggaaccacagaggattagggagaatacatagatcctggaaatagcacctagagatgtcatggacacctttcaggttctacctggcataactgggtgaccccatttattgctatggggaagactgaaggaaaatcaggtatgggcagaaatgtcaataaatcaaccttggacatattaagtttgagatgactgtaagagatcaaagtagaaatgtccaaaatgtacttggatttgtgagtctgggcttagaaagtagatatagacatagacacagagacccaacatgaagctttaggaatggatgaggtctcctggaaagagggtacagagggctagaagaagaaggcaggcctgaggcatatagaatcctggcatctagaggtcaggcagggtgagagggcccactggtcctccccactgccatttatatacatcacatcccctgactcagtggtaaagtcttggatgcaggtctgtgatgaatacatcactgtggcttgtcaaggaccagtgtattctcctggcagatggtaagggctcaatgtgtattggttgattggctgtctagagttgcatgtttataacatttagcatttttgcattgtatttgaaaacaagataaagccaatctgtgtgtgccatttgtttccccagccctgaagacattcagaaatcctgagtaagaagctgatggactgggactcagttggagttcttccaaattgagatgccagagggagcagtggctggggtcactgggcactggctggcatgaaaagcccataattaacttgttttgtttcatacctcatggggaggaaatgctgtctattttaatttcatgagcccgcaacattgtaagatttcaaaaaggaaaagaaatcttttattttggggcctcaaaggtctaggtcactaacttaatggggtattatgagattctattatagcaaatgactaagtcaactattgtcacaatgctactgcataataaacccttccaaaatttggtgacttataggaatgaatatttattcttgctcaggtgtctgtgggttgcctgaccaaggctatgttcttttggccttggctccaagctgctttctttttgaaccagcagctacttggaagtttatatgtcacagcaatggcaaaaatccagaaacagaaggctaactgctctggcctctgcctgtgttccatctgcccaagtcctactggctgaagcagggcacatggctaagcccaaggtcaaagggtgggaaaataccctcctcttcaagtggagggacagcaaagtcacatggacagagggaatggtgatgaactgagaaccataatgtaatctacagaagaaggcataacacattctcatgcctactaggaccaagcaaagcatgatacacaagtaaagatgctggatcagattgatgcagagatattttgagttcataaaaatacaggcatgtttatcacaatcacgagacttataaaatgtaccccattttctggaaatatttggcccacaatcttacattttcccacttctgatgaagacatggatgcagagaatgacctctctaccttaagaatacgaagagtattgacaatgggcagagctagagaggcaataaggagtagcaagaggggtggcaaagcagaaaccaaaataccttgtctgaaaggtacagctatcccttgatttcagcccattcttgtcagatggtatattagtccattctcacactgctataaagaactccctaaaactgggtaatttataaataaaagacgtttaattgacttgcagtttcacaggctgcacagaaagcatgactgagagaccacaggaaacttacaatcagggcagaaggtgaaggggaagcaggcacatctccttggcaggagcaggaggaagagagagtgaaaggggaagtgctatacacttttaaatagccaggtcttgtgaaaactgtatcctgagacagtactaggagatagggctaaactattagaaaccacctccatgatccagtcctctaccagaccctacctccaatacgcgggattacaattcaacatgagatgtgggtggggacagagagtcaaaccatatcattccacccctggctcctcccatatctcatgtccttctcacatttcaaagcacaagtatgccttcccaaaagttccccaaagacttaactcatttcggcattaactcaaaagtccaagtccagcgtctcatctgagacgaggcaaggtggaaaggactttgactacatgtcttgcatcttctcacagctccactaggcagttcctcagtggggactctgtgtgaggactccaaccccacatttcccttcctcattgccctagtagaagttctcatgagggctacacccctgcagcagacttctgcctggacatctaggcatttccatacatcctctgaaatctaggtggaggctcccaagcctcaactcttgccctctgcacactcacaggcttaacaccacatggaagttgcaaaggcttagggcttgtagcctctggagcagcagcctgagctgtaccttggctccttttagccatggctggagctgaagtggccatgatgcaggataccatgtcctgaggctacccacagtagcagggccctggtcctgccccaggaaaccatgtcttcccccaggcctccaagcctgtgatgggaggggctgcctcaaaggtctctgacatgccctggaggcatttcccctattgtcttggctgttaacattcagcatcttatatggtacttttctcccatagccaggattcatgggtccaggaatcaaggggtagaaatggaagtggccccactcaccatcaccccaaggaacccactagcaaaatttttgctgcttgttaccacgacattatgttctgctggcctagaggtcttagttccagagggaggaatgctgccaccaggagacacaacaatgattccattaaactggaagttaagattgctgcctagccactttgggctcttcctgcctctaagtcaacaggctaagaggggacttacagtgttggctggggtaattgacctggactatcaagatgaaatctgatgactacgccactcctggtaccaatcttctgtattaatcccttctcacactgttattagtctattctcacactggtataaagaactactcatattagatgggaacacaggctcagcataacatggactttgagatgtcaatagaggctaaaaattcagatttttatgtgaaattttctaactttaaaatgttgaacaaacaaaatccattgacaggtaggaaatgaactataggccagccaccacactataatgtctgttctctaagtttggatttctgaggttggcagaacttttcttttctactcccaagtggccaccaaaggggcagtggtttctggatatgtctttgagatgctaacagccagtttccttatgaggagtgaggtcaataaattcaaagatgctagaatgctttcctcctaattctcctgcttccataaaaatccaattcaatttaaactgcaaggcatagtgagttgtaattactatatttataaaaattatatataattagagcaggatttcaggaaccaggccaattctcccccagaatgtacactgaaaagcacattttaaagaacaaaagatgctcttgggtagggctatcatgtgacatctcccaggccattttggtcacttgtttttagcgggctaagtataagttcttcctgagctctttggactcaaaccattataagaacattaaaatttctttctggagattataggtagaataattgtatttcctgaacaaaaagtcaggtcatgtggttagctgagaatctgcatgccccttacacagccagaaggcagtgtgaggttggagactgacaaaggtggatttggaaatgagagggagacagaaatgactgctggtggtgggatggccaggttacttctgagtccccaggtcctctccaggtatgtgacctctttgagagaggcagggaacaaagccctgctagtggagggatcaggtggctttggtttccagttcctctctggtaactcagttgccaggtgagatgcaagggaccagatacccaaagggccaccttctcctcaaacccgaatctcagggcttatcagtttccatgcaagagggagcccacagaactttcacccaggccagcacatctggagccagaaatcacactgcctgaagctgagcctgctcaaggcttcaaatgagaccctgcctgcagccagctgtgtatctcacctatctaccctgccccagcaatccatagtttggcttgctagtccctgcacagaaggtggcctcacatgctttgagacctttgcatggtttgtgtcctctgctggggatgccatcacctcctttgcccatttatcaagatccagtcatcacattgtctggggtctttctctgatgcccaccccatgcagaatccagcactcactcttctgggtgtatacaacatggcacctcttgcgggatgttgcaataacttttttaaggtcagatgctccaaacagcaatggcttgagctaggtacactcattttctctcaaatcacaggagtaagtagtccagggctggtctggagtccctagtgccaaggaagcaggcacttgctagtccattgctccaccattcctaggggttgcccttatctgtatggacccagacaccattgccaagtcagaaactccagccagtgggatggggaaaggggagaaaaaaaaaagagggcttgcctctttcctttaaggacatggcaggaagctgtactcattcattcgttcaacatatattcatggggtgtttttcacatgctagaaactgttttagatactggggatgtgacaatgaacaggacttacaaaaatccctgccactgtggagtgtcctatgggaggtgaggggaccgagagacgttaatcaaatagggaaatacaacgcatattccaggtggtgtgaaaactgctgaaaaagaggaaacttacatcttagggaacttccggcgcaggaagggtgctcgggctgtggggggactttttgcatttaattaaagagtatggattgtcattgctggttagcaggagggtgcaaggtttagcgagggtgtgactgacaacccaggagcgccatgctccatccgtcctgcaggtggcgcgcctgagcccgtgcacggcagcctctccggaaggtgaagcacgctgccgcactgggggcctgcctggggctctgaaagcccattacgctgttctccttggggtcctcttggtggcatggacccacctcccccaacccccacccaaagcctaggtagttcttgtggaaggtgcatttcatcttcaacaagagaagatccgtttttcccgaagtctctatttcatctatttttcaggagcggaggctcatttctccttccttggatttaagacgctcttgttacttcttttttattgcttcatttgaaattgcagacagttccgactttttgtttttgtgttcccaggttttacggaacactctctggctgcgttacaaagctctcccagtttctctctcccaccaccagccccgctgccccacgacaccgcctgccctagactataaaatggcaatcataatccatacctcatgatgcccaaacaagataatgtctacaataagtaaggttgccagattcggcaaatcaaaatacaggacacctgggtttaaggtgtctgataaacaacgattttttaaagtgtgtgtaccaaatattgcatgggacatacttactctaaaaaaaattatgaattatcgtatgaaattcaaatttaactgggtaccctgtatttaatctggcaatttgaacataaggagcttaacacaaggcatggcctgaggtcacagtaagtgccagggacaatgatgagggtgacgatgactttaattctgatgaatgcgcaccccaggatggaagcaggggtgcgtattcataagaagggctttctagagcaatggaggcctaggctaagtcttgaaggactccaatcatgtgtgcaacaaatatttattgagcacttattaagtgccgggctctgtcccaggtgctagggatgcagcagtgaacaaaacagataaaaatcactgccctcatgggcatgatttattagtgggggagacagtatttactctttatttaaagaagataagcaaaaagaagtatttactctttatttaaagaagataagcaaaatctatagagtgtcaaatgatgctagggagaaaacataagtagaacatgaagtgttgaggtgaggtgaagttttggagtgggtgggaaggacaaacttactgagaagttggctgaagtaacaatgtgaagaaaggagaagagctgtgagatatttaggggaagctcatttcagaaaagggaggtagcaagtgcaagggtcctgcagtggagggcacctgaacgtgcaagaaacagcgaggacgcctgggtggcgggagcagagggagcaaggggtgggaggggaaaaggcggctgggtctcacagggtcttggggcaccagaaggacattgagtgagagagagccactgtggggctctgatataatctgacctgcgttccgataggatgtccctggctgcttgtggaggataaactgcaaggcaggagcagagagacccgtgaggaggtgaccgcaacaatccgggtgagacaggacggtggttgggaccagggaggaaggtggtgaatacattttgaagggagtgctgataggatttgctgctggttccaatttggagaggacgggagagagagagagagagccagggggaggaggggaggacactactaatgcctacttaaagagagttaaccagatggagaaagggaaaagaaacaatagctgaggcaatcccggcaatgattgcttcagctaggaagtgccttgcagcgaggatgtgacttccaacccgcgcgggacaacctgtttctccaccctcccagctggattgtggacacgcctgtcatgaatcctgcctccccacactgtcctgctgtgaatgagatcagcaatctttgctgccctggtcgcttgcagcaagagactgcttggcccctgtgctgagagagcacccttgcccagggcagagaacctcccctgccctcaggaggcccgggaagatttcctgggctgcctgagtctagccattgctcccatgatccatggcccattaacaaaccactccaaaatttaggggcttaaatagcaaccatcatttacttggcttacaaataggctatttgggccaggttccgtgggggaaggctcatctctgtcctcacagcatcagccagggaggcttttctggggaagggagtgtctgctgtcaaaatctggcagacaggttggtgctggctattgccagggatgtcgactaagagcctttggtttcaaatcccagctccagcaggtgcagctgggtgatcttgaaaaagtccttcaatctctctgtgccccagttctctcatctgtaaagtggggattgtcgtagcacctatcttatagggaattcacagagataatacattcaagggatataaagcagtgtctgggacatagtgctcagtaagtattaatgatcagtattagtattgtgattttttcatcgtaacgaggaaaaactcacaatgcagtaattaacaatttgtgcatgcttccccgtctccatgtctccatgagtagagttttaaaggaggttttaaaaaaagtagctcactagtaaaactagctaatatatgttaatcatagaaatttagaaatagaagaagaaaattaccctaggtaattactgttgctatcttgggaccatttctttccagcggtggttctcttttgtttcattcccccttattttaaagcagggttaggagaagaaagaaagaggagggggcaagtgtatgaacgaacatgccaagcagagtcaggagcagaaatttcaatacattccaatccacccgggacagaaatgacttgttctaaggtttgaaatgacccccttctctcaggtgagaatgaccataactccaggggtcccatgatgcgtggagttcaccatcttcagcaagaatgcggtgtggattcacagcgggagtgtgttcgcctgtgcattttacatttcaaacatttgtcactcaagagcattgtccaacagaccccttcagggaaccaggccaggaaacgctgagttcagagaggggctttgatatctgagaatgcagtgaaagagatgtttttgatagaagagtgattctcggctgctgaataagaaatagttctcatccataatgcatggccctttagaagacagaaagaaaagtcagtctaaatgtagcatagactggaaaaagatgaggagtgatttagcatgccattcagaagaggctagtcctcttctcagctaattcatgcttcccccaggctgactgaggaaggccccctcactgggggcttgcatggtgtctgttggtgtcaggaagaggtgcaaaggaaagtgttaagtggcaaggaggacggacctaacaaaagacagatcgagaccaaacacggaggatgttttctaactcaaagatgattttcctaaatattctagatccttttggggtttttattttgggatcctgattttagctgtagtgttcatcaatggaagcacaactaagaaaagtggtgaggggcaacatatgggtttggaggccttgtctgagtgacattcctgttggcctagtggtcttctacatggcacccagccacaggatggagcctgtttaataatcaggtgatgtttctagagcctggacaagccctttgttgttatcatttgtttgctcaagcatgttgccaacagaggacttcccagggtcctcagcctccaaaacaggttagttttggaaacgctgtgggaaaatattggtagtgggtcgaatactgtccctctgaaagatgggtccaagtcctaaccccaggcctctgtgaatgtgacctttatagaaatagggtctttgcagaggtaattatggtaaggactgagataatgtctgatatggtttggccatgtacccgcctaagtctcaaattatagctcccataattcccacatgttgtaggagggactggtaggaggtaattaaatcatgggggtgggtctttcccatgctgttctcgtgagggtaagtctcacgagatctgatggttttataaaggggagttcccctgcacaagctctatcttgcctgccaccatgtaagacatgcctttcaccacaattgtgaggcctccccagccacgtggaactgcaagtccattaaacctcttattctttataaattacccagtcttgggtatgtctttatcagcagtgtgaaaacacactaatacttcctggagttagagtgggccctaaatctaatgactggcatccttaataagaagacaagaggacacagagagagaaacacagggcagaagctgtgtgaagatggaggcagagcctggagagaggctgccacaagccaaggactgctgaaagccaccaggagctggaaggggcaaggcaggattctccctggagtctttggagggagtgtggccctgctggcacctcaccttgattgcagatgtctagccttcagagctgtgagagagtaaattaaatttctgatattttaaatccctgcaagtttgctgtgatggccttaagagatgaatccagtattttaggcctaaatctccctggtctcattttgtcccattcccttgtcacttttatgtgtcagccaaaatggatggatttctggcagtttccagttcttttttttcttttcttttctttttttttttttttttttttttttgagacggagtttccttgtcacccaggctgcagtgcagtggcatgacctcagctcactgtaacctctgcccctgggttcaagccattctcctgtcacagcctcctgagtagctgggattacaggcgcgtaccaccatgcccagctaattttgtatttttagtagagatggggtttcaccaagttggccaggctggtctcgaactcctgacctcaggtgatctgcccaccttggcctcccaaaatgatgagattacaggcatgagccaccacgcctggcctggcagtttccagttctttcccatgttctccccactgtgccttcccccacactgtccctggctattgtttccagcactgataccccaccccatctgcctttcagaattaagctctcctagtcaagacagccttcctgacaccacctccaccccagcatatattctgtcctgtggttgtaccatggccctactgaggctgggtatgattatttatttgtgtgactgatctgtccctctcatcaggccacatgacccattcattcatcaaattgttaccagtggagggtgtccaggttcttggtgttttgaacatggaattggacaaaacgcacaaacaaagcaaggaaagaaagaagcaacaaaagcagagatttattgaaaacagaagtacactccgcagggtggcagtgggccatgcagctgctcaagggccaagataccaaattttctcaggtccaagtaccccctagaggtttcccattggccacttggtgcttaccccatgtaaatgaagtggtggctcacaatctgtctgattgcagaaagcaaccaatcagaggctgaagtgaagttacaaaggccacactcctatgcaaacatctgattggttgcggaaagcaaccagtcagaggctaaggtgaagttacaaagctgcacttctatgcaaactaagacttggctcccggtgccccaccatcagtctgattggttgtagacaacaaccaattaaaggcttaagtgaagttacaaagttacactcctgtgcaaacatctgattggttgcaatcccagcactttgggagactgaggtgggtggatcacgaggtcaggagtttgagaccagcctggccaatatggtgaaacctcatctctactaaaaattacaaaattagctgggcgtggtggcgcgtgcctgtaggctcagctactcggaagaatcgcttgtactgggtaggtggagcttgcagtaagccgagattgagccactggactccagcctgggtgacagagcaagactctgtcttaaaaaaaaaaaaaaaaaaggtggggatttgcaaagggagttgcctctggtccttttgttattaggcgtggaaagttagggttttcctttctatttagttctaggaagtcagcgtgaaatagccttaggttccctgcctccagacccttttctcctgcctcaaaatacttactgaacacctgtgtattgcaagcactagcctaggcatgggccggagaaaagggaacttagtatgagaaatcttcttttaaaatagtattggtgttctaatagatattaacagcctataagggatatggtggctttaagaattagatggaaaagcatgtcagtagcttagaacagtgcctgatccactgtaagaactcaatgaattctagttgatattatggattctgttactgggaagttattattggaagaaacagcatgtggtccaaacagaacatgtctttgggccaaatcctgttattcttttgtaaagcaagagaagaaggaaagtgctggccctgtggaagattgcataagcctctttgccactgtctccaagtctttggctctgtgtctgtgtgttgcatgcagccatgtacactcatgcacacgcacacatgcacacacgtccatccctgtagtcctgtgtctgctgtctcaccccacaccgttggccatggcagccagctctcccagtggttctggggccacagagaaagttctcagaatccattttcttccaggtgtgagtgggcaggagcagtaggcaggccacgtgcccacattacaaacctacaggaagcctcttaatcaccacgggcttggtcagtagaccttgtttctgttcatctctggtgcatcacctgtagtgcaggtggatccctggtagggggctgagatgatctccatcgacttgcattcgtgtgacattggctgtgacgtgggaaagaaaggttctattcaaattccttttccactcctccccctacctcccatgacttcaggagttggaaaggcaaggtgagtgaaaaatcagggaatgaaatgcagtttaaataaagagtttgaagcagtcctcggacagtatccctctctatggcagatgcacctgacagcgatcccttaggcatgctctgagaatagtgcacctggatgtgtgttctgagttaccagctaaggaatccagatgtggccaacctggagatccattcctggtctatgaggaacacctgagctcctccgtcccatccgttggaacatggatagaggccctgtgttttgggttgaatgacgattgccaagtggaggttgttaggaggaggatgctaagtgaaaatgctgtatcaaccacatgcctttggcaagcagttgcggtttttctgcccaggctgctgccactggactgggggttctgctgtccagcccaccacgactagactctctcccctgtacataagcccccagtgaaactccatggctcctttgctggctctgggtctctttgggctcttgaacctggtgccatccccattagagtggatgggggctcagcacaacattctcccctgggaggaacaggtaggaacccttggtgagctggcctcatctagaggagggatctgatggttgcatggcccacgcaaatgtttcattaggctcataagatgatttgaaagttctgagtcagttgtcagtgttttgaaataggcagattcacaagaagatgcttgtcctggcttttgcaaacataaagagctctggtcgcaccaggcctggttcccaccagaacttgatgggtcacagtgagcctccatgctcttttatttttaaaattttattatatgtaatgtatatgtatacatttatattaaaatataaaattatatgaaaatagataaattatatgatagatacaatttttatatattatatatgttataattaatatataaattataattaatatataatatagaagatattactatctattatataatataaatgttctatataatataaattatatatacatgacattaatatataatatattcgtattcatatacaatatgaatttatataatatataattatatctatattgtatttatataatatataacatgtaataatatatatttatatacacatatatgtgttatatataatatacagtaacatatttacatataattaataggtaatactatattaattatatataatatataatatatcgatatgtgatagtgtattaatataatgtaatattaatttattacatattaattacataatatataatatataaattgatactatataatatataatatctatcatataatatataaatgtgtgttatatattactaacataatatgttatcaatatataatatatattatttaaaaatttatcttacatataataaatattaattatataattatataaattatatttattatatgtaattaatatacattatatatttttctataattatatataacatatattaattatatattatgtaaaatatatttatatataaattgtgtgtgtgtgtgtgtgtatagtggtgaattgcataatggtgatgtctgagatttgagtacacccatcacttgtttagtgtacattgtacccaatatgtagttttttttatccttcacctgctcctactctccccctctgagtctctaaagttcattatgccactttgtatgcctctgtgtattcatcgcttagctcccacctataattgagagcatatggaatttggttttttttattcctgagttacttcacttagaataatggcctctagctcatccacatttctgcaaaaaacattcttttgttcttttttatggctgagtagtattccgtggtgtatatataccacattttcttatccactcattggctgatgggcacttaggttggttccatatcttttcaattctgcattgtaccttttttgcccttttaggtggacagtgccctcccgctcgtcactgtcactgctcctccctgcccagctctctcattccccctcctccgtgtcccttcaggtttctgggtttgcgcaccacttctgtggctcccagggcacagtgcaccacggctgtgctcagtcatctttgctgacgaacagagggcaaagggctgaagagaatattaatatcctatcatgtgggccaggtgtggtggctcacacctgtaatcccagcaatttgggaggacgaggcgggtggatcacgaggtcaggagttcaagacaaacctgccaacatagtgaaaccctgtctctactaaaaatacagaaatcagccgggtgtggtggcacgtgcctgtagtcccagctacttgggaggctgaggtgggagaatcgcttgaactcgggaggtggaggttgcagtgagccgagacaacaccattgcacttcagcctgggtgacagagtgagattccgtctaaaaaagaaaaaaaaaatatcctatcgtgggcacgtgcttctcctcccagacctccaagccttggtgctcagtccctctgcagacccaaaggtgaaagaaccaggatccgtctgcgtcgtggcatggcccatgatctgcccagaggactggcacccactgtgtgcctgtcccctgaactgccacaccccactgtggagttggatagcataaggggtggacgagtgtcctgaggctgctataacaaaagactacaatctgtgtggcttagaaccacagaaaattcttctcccacagttctagaagccagaagcctgaaacggaggtgtcaccagggctgctctgtctctctcaaggctctagtggagggtccattccagcttctggtggctcccgggttcctccactgtggccacagcctccaatctctgcctctgtgggcagacagcctcctcctcttcccgtccatcctccacgtgtctgcctccctctgcctcactcttctaaggacacctgggatttcttttatgacccacctggacaatctaggaccagcgcctcctctccagaccttcaatttaattgcatcgtttgttctataaggagtatttactcttctgccatagggagcatataggtttcagggattagggcatagacatatccttcgggggccaccattcagtcaaccaaaggcaaagggaaaggcctcaggacagtcagacttgggttcaaatcccaattctgatgatttctggttgtctgacctcaggcaaatcgctctaccggtttaaatccgtctcagtggcattaaaatggaattaagaaactagttcatggagtcgtgatgatttgatcagctcatgtgtgcagggcacatagcctggtgcctggcactctgagtcaatgttcagcacatgctagcagaaaagcaacagcctgcagacctcggccgaggcacattctctgaaaagctgtgtgttatgagccatgcctctccgtctcctatgaaatcagcctgggcttgtcaacagccttcccaggacgtgcatgttttctaggtgctgggggagttcggagagagcaagcagggagataaacacgtgcgtgcgtctcctccctggtgtttgcacggcgtgtgttgcttctggaatgtgtgcctgagctttattcctgcttttgctttttacagtggattggacaggtttggatgaggaacagaagcacagagaggacgagtggcttgtcccatgtcaccctcataataagtgggaaagacacatacttcgctccctaagccctgtatgatgcttgtgctcattatacagcatgatgaaatggctcccatctttccttgttgttttacaagcaatttgggggagcgggagtctaaaactttgcccatctcctgattgtaatggaaccagttccagagaggcacttgtgttgtttggagtcccctgggcaaattaaaccccattcctgcttatagaaaccagcactccattgaaacacaatgacacagtctctcccctgagcgtacctgagcaattctggagggtggagctgctggcaatgacttctggatgccggggaagtggttcctcataagcctgttcctcaacacgctttggggatgtgatctacctgattctcccagtatgggaggcagaggagagatgctggctagggaatgccaggaaagtccttactgggcattctgcacttctccttataagactggaagagtttctgaatggaggaaaggagactccatgtgtcacccagggttctttggctgtgtgcaacagaaatcactctaagtgtaaggaatgggaacagatgaaggtgctcagaggatggaaggaaagactggaaagtgacatttggaaaaaaaaatcgggtctcacaggtccaaggagactcttggtagcaagactgcttgatggtcttgtctgggcaccagcgctgaaatgaactccctctgtctttcatctgggtccttttaataggatcccatcatgttttgagcagttcctcactttgcacagcaagctgttttaggctcatgttgttatttccctgcccagccctgggaaatggtcatttctgaaggagccctggttccttttagtggggactggtatttagaaaccaagctggagtgctaggtgtgctcattactgctagaatgttcatgcttcttagcctctcagtgaacagaacatatgtgcatgttcgtgtgtttgtgtgtgtctacgtagaccataatatgagtttacactgatgtatggaattccagcctaataccacagggctgtttctcccctttccacattctccattggtatttccctccttctgccatagaaggcaaaagaaatcctgggtgttggaacccaggctctcaacacaatcaaaacatgtattcatttgtttattcctataccacatacaaaataattttagaattgctatatcccaaccactgcaacaataaatctacgaaacagagttcaggattcctttgcattttttttttttttgagatggagtcccactctgttgcccaggctggagtgcagtggtgcgatctcggctcactgcaagctccgcctcccaggttcacaccattctcctgcctcagcctcccgagtagctgggactacaggcgcccaccagcacgcccggctaattttttgtatttttagtagagacggggtttcaccgtgttagccaggatggtcttgatctcctgacctcgtgatctgcctgcctcggcctcccaaagttgcagttctttttctgtcatcaaactgagggttgatagtccaagtactaggcttagaagttgttcgagttagtaacctctagaacgtctgtgtggttatgtaattcatttgaaatacagataggtttcttcatttttgtttttattcaattttaggcttttctctatattgttgttgacttaattttatttgttgaatgcataaaacattgacaagattccagaagactaagctatgtaaaacaatagacccagtaaggtgccacccctccgctctctcctctgccatgttctcacccaccctctgcaagtaaccagcttccttagtctttggttattgtacctattctttcccccaccccccccaaataagcaaatacatacaaacaataacagtgcttatctagggaggagggtacaactgattattattttaaaggagaatgaattaatatagcaggtaatttttaaaatgaatggaggggaggaagtggctgtgggttagatgctctttcctatggcagggagcagtcctcttttggggcacaggctttgctggtccccactgctgattcttacttcagcccaccctggtgggagtctagggtgctgcacagccaactggcaaatcttcccataccctcaacccttgcctactggtggtcttcatggctctgacctgcattattcttccagctctcacactctctttgttcacctctcgaaatctttttctggtccccaggacaggtgatgttaaaaatacctgtgagcgtcctcattcgaggacctcagttcccggaggccctggggccttctgccgcagtgactcaccagctgttcttagggaacatgactgtctggatgcatctggcttgcagcaggttgacagattcaaagtgaaaggtgctataagtgggttccaggatacagaccttcctaaaggcaccctggagaatcttcccaaggtgaagctttaaatgtacagtgtgtggtaagaggagtggcgaggaaagtttgttgtcttgcaagtatgctctgaccctgtataccccatgcccttgtctcccaccccacccccctccaccatgaaccagctgcactgagctctttctctgcctacaccctcaggcctctgctcttgctgttttctgtaacctagaagaatcttcccagagacctccaggaggctgggccattcttgtcattcaattgcaatgtcacctcctgagaaaggccctttctgactatatagtttggtagggggccacagagtggcttaagtaacagaaatgtattgcccacattctggaggctggaagtccaagttcaaggtgctggcagggttggtttcttctgaggtctcattcaacagagagaggtgccgtcttctctctgtgtcttcgtgtggtctcgcctctgtgcatgtctgtgtcctgatctcctctccttataagaacaacagtcttattcgattagtggtccatcctagtgacgctattttaatccaattacctctttaaaggcccagtctccaaatacagtcacattctggggtcctgggggttaggacttcaacacatgaattttggaagggtacaacttggctcacaatactgaccattctatcgaaagaccccccctccccaaacattctgccttatcactctttagccacatcctattctatctgcttcagaaccactatcactttctaaaatgacctcaattaattttatttgatgatttatgtattatttaccagcaactctagagtggtgctgcccaatgaaaatataatacaagagtaaatgttgccatagatataattttacattttctagtaggcacatggaaaaagtttaaaagtgagattaatctttttttttttttaagttctgggatacgtgtgcagaacatgcaggtttgttacatagatatacatgtgccacggtggtttgctgcacctatcaatccatcacctaggttttaagccccacatgcattaggtatttgtcctaatgctttcccttctcttaccccccaccccctgacaggccccagtatgtaatgttcccctctgtgtccatgtgttctcattgtttggctctcgcttatgagtgagaacgtgtggtgtttggttttctgttcctgtgttagtttgctgagaataatggcttccagcttcatccatgtccctgcaaagacattaactcgttcttttgtagagctgcatagtattccatggtgtatgtgtgtcacattttctttatccgggctatcattgatggacatttgggtagattccaagtctttcctattgtaagtccattcaggacataggcatcggcaagactttatgactaaaacaccaaaagcaattgcaacaaaagccaaaattgacaaatgggatctaattaaactgaagaacttctgcacagtaaaagaaactattatcagagtgaacaggcagtctacagaatgggagaaaatttttgcaatctacccatctgacaaaagtctaatatccagaatctacaagaaccttaaacaaacttaccagaaaaaaacccattaaaaagtgggcaaaggatatgaacagacacttccaaaagaagacatttatgcgaccaacaaacagattagattaatcttaataatacattttatttaatccaacatatcaaaaatatttcaatgtgcaatcaatataaactttatgattgagatactttacttctttttgtactaagtctttgaaatctagtatgttgtaaacttaattaaatagtatctgagacaggtctcaatcaacttagaagtttgttttgccaaggttaaggacacacttggaagaaacacaaaatcacagaaacagtctgtggtctgtgcctttctccaaagacgattttgaggactttaatatacaaaggggacaaggaggctggaggggaaggagggagggtaatgtcacataactgaatccacgtgttgtaggagaaagggggcaagtaggggaatagttatatattccactggcactcactgtaagataaggtgagagtagctacctggaggacttagaacaaaggagggaagcaccgtggtcagcttacattctgaaatgacgattctgctgtgggagaatagactgttggggatggagggagggcaaggtgaaagcggggaggcaggtgagaaatgataggagttcactaagcaaagaggggagaatgctttaggctgaggcatcagcacgtgtgagggtaaaagagctggaaggagctggacatattcacagaactgggaacaggtgtctgaggaggggagggtaaagggaggtggcctatgagatgcagtcagaggggtgggcaggggctactgctaagacctcgtgggccacaggaggagtgaggcctccatgctgggagttgtgagggccagtggaggtttagccagctgattggagggactccaaactaaactgctggcccctctctcccacgtggcccattttcccagaccctgggtgctgtggattggctcctatgggtgcagatttcaggtggaagccccctggcaaggaggggccgtgagggcagcagatcccatccccagtctgtcaggctgatagaaagtttgacttcgggcgactttcttgcctcctcaatatatgaataattctcaggtaaggaatgattgcaaactaattttattattattattattatttttaccacagagagcctaccgcacctcattttgcttgttttcttattcttcccttcacagtgctgctgaacttttatgttgtgcttgaatcatgattcagctcttaaccatgcttctaaaatcctattcccagcctagtacaggcagacccaaaccaacacattacttctaagtctaatttagcctgttggtggtgcggcatttgtgctgctgtctgaagccaggatgctttgctcttgtttgaggttgtttgcatacagaattgttcatgtgtttgatagcccagagaatgcacagagctctagtgatccctgccaatgctttctggcaggacccatctctcttgggctatatggggcccttgggggaggcagcaaggccaggctgagtgaggccttgcaggccctggtaaggagctggactttatttaagtatgctgggaaagtcactggagggctctgagcagaggagggacatgacctgaccctgcaatttgcagggtcactctggctgtacgaaggtgaggacaggaggactggggaagaggaaggctcctgcaagagtccgggggagaagttgggggcctgagccaggagggcagtctgggggcttccctttcattcccttcccattgtcttctcctggaggtggaggaggacctgagcccatcctgttgcaatgttaggatcttctggaggagctgggggagctcggagatccacctactaagggctttctggaacatgcataataaagaggagggagctgcctgctcagaagttgggggagtcttttggaagaaggttcttttctactattctgtgaattgtggagagcgttatattatctcaataggaaaaagaaaaaaaagtctaaggattatgccagtcctctaaagaggagtctgttaggctagagaagtggaagaatgttccagaactctttgagctcccaagtttgagtcctgctgctgcctgaagtcaccatgagagcccttggggccaagcattgcttcatcctgcttcctctctccaccccctgccagggttttcagtgcagacactgtggggcctgtggctgccttttctacgttcctccagccacgatgaggaaggtggctgcagcagacgggcaggggcgagttgggcagcagaggggaagatggcctgggagtctttaaaactgcccaaaggtggggcatgtccaagcatctcgatggggggaaataggcacttgaaagctggaaacttttgtggtccggattctgagaggggaaaaaaatcaacaaaacccagccgtccccaaactcctaacaatgttctctggtgcaggagtgattcccagtaggcagggtccgagccgccctccctgtgagcatggtgtcagagcctcaggttgctttggaaatggatttgttttttaaaccgaagctgagctttattagaagagaaaactaggtcctgtgtactggggaagggagttttacaggcagcaccgagccgggccaccttccctttgacttgctgggaacgccagggcaggaagcagcagctgtctgggagactggcaagaagtccggactctggggatcctgactccaaactccagccccatcgttcccggaccaaactgagggctgggctgcaatttctcaccacccaaaaacgagatgcagatgaactggggaggaagagagtttttatttctgtaaccggttaaagggagaaggcctggaaatgatccccagaacaattcaaaatgataaagtttgccagagcttatataccttctaagctatatgtctacgtgtaagtgtgcgttcgtctaaagacataagtgattaacttcttttaatctacaatgaaggcccgagtcccgaagaccttcctctggagcctcagtaaatttacttaatttcaatgcgtccaggtgctggggtgattacccttatcttgtcccctgctagaacatggaggtttggggagttccttcagagccccagtcaacttgtttgtgaaggcctgggaagtttcttcagacccccattaaaacttgtttaatcctaaacgggtcctgttaagaattccttcattattttgccatgctttaaggcccaggaagagcctaggcaaaactctgggtggggctttgttacattccagcctttgtatgagggcattggctctctcagcttttaatatttcacttcagcactcagcactgaaacagttgttacggaggcctgcgttagtgagacctggcctgccattccatgactgacttactgggcaagtgagctcaggcaagttaggaagccttgctgagagtaatgattctctctagccagacagttatgagtggtaaagaatctgcaacggattcagcaactaaagcacagagagggcaagtcacctgtccacagtcacacagcaggaatgcggcatagctgggaattgaacccaggcagtctgaccccagaacccacacacttaactgctattctctaaggaggagcttgtaaaagcttggccaccttaggtggcctgtgtcagtcatctgctggcttgcggatctgtttctagtctcccaatcactgtgctgcaatcactaatgggctgtggggcccagaggcaggcatgcccctggataaacctcggtatctttatctccaaaacccatcttccatagacatcattgagcacccagccaaacagcgcagaggaagggacccctgggtgagacagtcagaaacatcaggacaggaagcagcagccgcagcaggtctgtaaatgccagtcctgtgttcacttgtcacaagtcttgtaactatgcaggatttccaacaataattccttctggtggggatctctgagaaacatcaaccaatcgtacccctcttctccactcagttcgagacctgttttgtccgatgtaggagtcatgtgccacatgtggctatttaaaagtacattttaacaaattaaaaggaaaccaattttaaaatgcagttcctctatctcagtagccacatttcaagtacccactgagcccatgaggctaccaggtgcccgaggctaccagctgccgtgctgggcagcacagacacaacgcttcctcatcacagaatgttttattgggcagcgcttgtctaaacagattaaaaatcaagaataagagtaacagatggaaaccaaaatactgcaccagctaatgcatacagagtatttatttaatatatggccaggcattactctaagtgttttatatgtgttaatacatttagttctcataacaaccctgacaggcagttaccatttttatctcattggatggatagagaagttgagtcacaaagaggttacatgaacttgctgaggccacgcagcgggtacatggccagcctgaattttaaccctgtggctctggaaacagcacgcgaaacctccacactctactacctctgacttcttacaaataaatgctcagttggaagttgtagcccagatgagggtcaatgtgacttcctaaaaccataccctagagttggacagaattaaacacttggtgaagttggtcctggtctggggttggcccccagcctccctgtcgtgtgctggccctggagtggcccccgtgaggacgagggacgctgcacacaggagtaggggactcgtggcttcctgtgggcaggctgacccaccgcagggtaaaagcaatgtgtgagccaaccacacccactttggttttctaaaacttgcagccagatattcctctccctggggtgggatggaaagcatcggacagagggcaggagtctcatcctctctgagtccccttcatctggaaggaaatatcagaaatggggaagaacggtttctcccgaaagctttgaaaagaacaaatgaaaaatataaagaaaatgttttgtgcctttgaaagtagacgcccaatgcatgaatcttcctaaactcttcagctgtcatagatatggttatgagcaacagaaacccaattaacttctctcaaatgaaaacgaaattgattgtaaggatacagggaaatcctatagaacccagtgcatggaggtagcattgccctcttggaaagttgtcagacagtgtctgtctgcaatctgcggtctgagtaatggcctcttcagaaagtctcctagctcctcctcccccaaacttcaggctccatgtgaaaatgaccctaactcccacctctaggtgctcagcccaaaactctctcccttgctctcatgttctgaagttctacctccaaaatatttctcaagttcattccatgctcatcatctctcctctgctctgatagctgaagccaccatctctaccaaggcagccacagtagcctcagaagtttctctccacttctattcttttttcaccatagtctcctctcctcagtgtacctcagttttgcattttaaactataagtctgatcatgaaatggcccttgtttaaaaccctccagaatcttctcagaagcacttagaataaaatctgagctctttaccatgacctgcaaggctgtgcccgacaagtggctaccacctcctgccacctgcctcttggtcactgtgctcctgccacactaccctttttttttttttttttttgagacaaaatctcaccctgtcacccaggctggagtgcaatggcgtgatcttggctcattgcaacctccgcctcccaggttcaagtgattctcctgcctcagcctcctgagtagctgggattacaggcgcccgccaccatgcccagctaattttttgtatttttagtagagacggggtttcaccatgttggccaggctggtcttgaactcctgacctcaggtgatctgcctgccttggcctcccaaagtgttgggattacaggcatgagccacctcacccagccccaactgctcttctatttgttgaatgtgctaagattgttcccacctccaggccttcgcccttgttgttccttctgccgaaaacactcttccctcgtctctccatgtggcaggcttatccttcttttttttttttttttcaaatatttactcaaataccttttcttctgagatgctgtctatgatcacctaaataaaagtgaccaccccacttgctatcacaaataaggaaatattactactctgtttatagtagtaagtaaattaaggatagacaaatgggaattattgccactaaagggaatgattctgtctattttctatttatttattctctcccacccctggactgtgggctgtagaggtagggatcatgtcagccttattcatcatagtgaagcagtcttcaaaagactgcttggcgcataacaagtactcagtaagtagctgttgaataaatgaacgtacagcttcaaaatcccaaaatctacagtttttttgtttttgtttttgttttttaatcccttagtccagctcccatttgagagattcctattgggtctcttgtaggcatggtgtactagggtcacctggcatgaatgaggcttctgaagaagggtagagccttttccatgcaatggggcagaaatgccagagctgaactgagctaagctgtgttattccctcagccaggagctgaaatcagctcgcatcactcacagtgtcaagtctgtaaagtcttcagcttggtcttgaaggccactctaatccagccctctcctacctgtctcttcctttctttccaatttaactgtctctgtggtccttactccagtttgtgctcatcttgaacttggttcatcactttttccatctgccaccttttccttctctagcctcatagaataagcttgcaactcttcattctgtctaatttggggagtgaagcagaagactctttactttgtctaatttcttgtatgaaacagggattaactcttccttaaatgtttggttttggtagaactcacctacaaaaccatctgggtctagggcttttgaggagggagaagagaagtctttaaataccattttaaaattttcttgaacatactttccaagttattttaaaatccatgtctgctaagtttattatctgggtcatttgtgagtctctttatatattctgttttttcccttgttttttggtcagcttggtaacttttgattgaatatgggacatagtgtaagaaaaattacagagtctctggactgcattttcctccagaggtgattgaccctctcctttggtgggaagctagtctagaatggtcacttcaatgcaatcagagactgaactgaatccactgtacctccacctctagggtgtcatcctccaggcacccaccctgtgatgctgtccagaacccatccttcttggcaggtcctgaactcaacgatttgccccttcaatactataaggctgccccaaatcattccctgtttttcaggctatttcttaggactcctgccatgggcagcttaaggtctcagaaatgcctcaaggagaaactgcatagtattgggctcgtttctctgcaccttcctttttgcggggatcttgcctcaatgctctggcagctcagaactccccttttgactcttagctctgtgagactgcaggaagctctgctggcttcactgcccacagcagctgccctctgcgtggcttctcagcctttctacctccgcaactgttctcaggagaaaacagaacacagaaagttggactcacctcaacaaaccacccttcgttctgaggtcaagcgctggctcctcagtcactttttaaagcctccaaaaagatgttgctgttgttttaaatttcatctggcttttctaattgttcttggtgagtgcatgggtctgctagcatcacttcgttgtagctggaagcagaagtcctaccatgttaattaaggaaaaaaatggtctcttcgagttatttcttcttatttcaattctagcaccttctgttcttcaggaaagctatctgtgctccaggttttccttcctctttgctacctacacagtctgctggtcctccagagctccatctgccccgcatttcctttgtgaagcctgtattaggccgttcttgcattgctataaagaagtacctgagactgggtaatttataagaaaagaggtttaattggctcacagttacacaagctttatgggaagcatggtgctggcatctccttggcttctagggagccctcaggaaactcccgatcatggcagaaggtgaaggggaaccaagcgtgtcacatgaggaaacaggggcaagaggtgggaggcaaggtgctgagcatttttaaatgaccagatctcatgagaactcactgttatgaggacagcaccaagggatggtacaaaatcattcatgaagaatccacccccatgatccaatcaccccccaccaggccttacctccaacaatggggattacaattcaacttgcgatttgggtggagacaaatacgcaaactctatcatccgggaatgctggacaaaaaccagtatagatcataacactacaaggcctttgcctgcctatgaactatactcggctcacagtccttaccccagaacttagtgcagggtcatgtgctgtgttgctttgtcttctcattatacaacaatgataatgatgctgctgtttatagagcactcgttatgcaatagaagctcttttaagctctttccacacattgtctctaatcctctcagcaatgtaggtgcagttattcccattttacaggtgataaagtgaaaacttagctctattaaaggagaggcccataatccctcagccaggggcaggatcagcatttgcagccaggcctgtgtgattttttctcttagtataacagtgactgaaatggatgcaaggaaggcctcactggcaaaactggtccgaaggaatcaggcctgtccaggagacagcctgtcttcatttattggtgaggtccttttctaatatgcttattctcctttggaaaggagacttgatttcaacaagtgtaaatacaattcctgtgagataatttctcatgatagttttaacagaaaacccgggaatctcccacctccaacattctgctgatcgagttagcaatgatttcatttccagctaaggacgcacttaggactagtacaggttaaacatgggcactggagtcagaaagactgacaacgaaaagtgttaggtaaggaggaaaaaatctcaaaaatgaaattctgaaaatgtggaacatcattttcttctggaatgtgaaagttggagcgacgcgcgccaccacatgctaaggggaggagtcggctgctggctctgcctgtctgcaccctcctccctcagaggggaaggtgagcatgacctaacggcccaaggttctcacctccacacttcaccttgacagcataagcttaaagaggtcatttctgcaaaaatattcaccacttcttgcaaaggcctctctgaatcctttgatatttaaatgattctttcttaaggtgtacatgagacagtcttggtgaaacattgaccaggaaagccactgacaggtggctgggggtggaccctgaatgaagtgggcagggggcctgaggaagacagaatttgggtgatgagtgttttcaggatagggctactgtagcttctgtgtctagcaagcttgtgactgtggggcctggggtgtgaatcctccaatagtaaagaccctggtcctgtagaagtgccaccaggaactggagggaaagaaaaggactttagctgaatcccataggtggttgggggaagaaggcagggtggggagaagcagagcctggctgttatggactgaatgtttgtgttccccagaaatttacatgttgaagtgtaactcctgatgtgagggtatttggaggtggggcctctgagacgcaatgaggtcttgaggatagagcccttatgaatggaatgggattagtgcccttaggagacacaagagaaatgatttttctctccactacgcaaggacacaatgagaaggcagctgtttacaggccagaaagcaggtccttcaccaggaactgagttggctggcaccctgatcttggacttcccagcctccagcactacgagataccaatttctgccatctaaaccacccagtccatgataatttgtcatagcatcccaagcagacgaagacaatggcgcattcttgggtcaacagacttaggaaaacaaagaaaaacaaaacaacacaggatgccctgttatattttaatttcaaatactgcatgggacatacactaaaaacatgattcattatttatctcaaattcagacttacctgggcttcctggatttgatctggcaaccctaattaggaaaaggtgaaaagcgagccctctgtctttactgaaatcccccaccatgtgtccaacagaacgccctcctcccttcctccctgcctctcactcgtgtctgctgttggtgtgtgttaagtggggtgtgggtacgaatccatcacactagtagcgtcaagtgataacatgctgtgttttcagcatcaagcgcgtgtgggttggaatcttgccacataattcttctaatgccgaaagggtattaattaatctcactttcctcatttgagtaaaaatgtaaagaattcctaacttgcaagtgttattggtaataattgagggaaagtgaggtttttttggtctggggttcttacaatcatttaggtagttgttattaaatctcccatctgtcaagtgcctctgactgctacagactaaagtgctgctatggactaagttgtgtcccctacaaaattcacatattcaatattagagccctgatgtccagtgtgactatatttggagacaggatctttaggaggcatttaaggttaaatgaggtcttaaaggtggggaactaatctgatagaattggggtccttaaaagagaggtcggagctctcacctgtgcccctcacccccccacatgagcacagagaaaggccacatgaggacacagggaggaaggaggtggctgtcttcgagccagaacgtgggccctcatcagggactgaattggctggccccttgaatttggctggcaccttgatcttggacttcccggcctccagaactgtgagaaataaatttcagctgtttaagccactcagtctgtggtattttgttgtaacagccaagcagattaagacgtgtgccttactctgtattagacacttggcgttcactttctttaatctcttctgatcctaaaccaggctatgatactcccattttgcagtggaggcttggtcacataaatttcttacaggggttgcagccttgtgggagaggggtgacaactggtggtctgtgagccacatcacacagacttttttttttttgagacagagccttgctctgttgcccaggctggagtgctgtggcgcaatctcagctcactgaaacttctgcctcgcaggttcaagtgactctcatgcccagtagctgggactacaggcatgagccaccatgcccggctaatttttgtatttttagtagagatggggtttcaccatgttggccaggctggtcttgaactcctgacctcaagtgatccacccgtcttggcctcccaaagtgctgggattacaggcgtgagccaccgtgcctggccacacactgacatttttcacagattaaaaaagaaactcatgtttgtaatcccagcactttgagaagctaaggcagaaggattgctcgaacccaaggcagaaggattgctcgaacccaggagttcaagaccagcctaggcaacacaagaagaccctgtctctacaaaaactttttaaaaaaaaattagctgggtgtggtcacacatgcctgtggtcctagctactcaggaggctgaggcgggaggattgcttgagcccaggaggtcgaggctgcagtgagccacgaccgaatcactgcacttcagcctgggccacaaagtgagaccctgtcacctaccacccccaccccccgccaaaaaaaaaaaaagaaaagaaaaaacacttaaactggttgccaacattgataaatttgaagatttcatgaaaacttttgagtttgcaatcctctggacaagaaataaaagccgcagttcctgttattggtcccagagccttgatgaaaattgtaggtgacagaccagtcatttcatccctgcccttcttgctggtggcacttccttgaggacgcacttctacctgacaacaccagctgccagagccattgttggggcacgagagcagagtgaccaaaggaggggagtctggaggctgaagcctgcactggggtcccagcgctgccatttctgctgggtgacttgggcaagctctttgacctcacaagcctccctgttgagtgatgatgataataatgcaaagaaaattaaataagtttgttgacatacataaggtttagcaccatgcttagcagcaaggttaccatgcagactcccacctggcactgaggcgatggacgttcctaataaaacagctaccccgcgttgcccgcctcgtgcgcaagaggccctgctctccacacttgcactccatccgttccatctgcactgctgggcagaaaggcaggtggcggcagccccatttcaccagctgaagaacatgagtaatttgtcccaggacacagctaggaagagcaggacccagggttcatgcccaggctcctcttcctgccctacatggtctcctgtttgcaaaatggaggggcctaggggtagagaaagggtgtggtgtctccagctctaaaagtctatctgagtcctaagatgctgcagaaaagctttgcctcccacctccctcaccctcatgtcctgaagggccagcctggggacagaaagctgcccgatggtcacgtatctgagggctctccaacatttttccaggacagaaagggagtgattctggcccactcatttgagcacacagcagagctggcagcctccctacacaggtagtgcatttcagcatcacccctgcaactcattctcccactccttccccaccctcacctgcccctccaaacaagaacggtggctcaatacacaaagcttagatacacaaagcttagatgtgcagtggctttctctctctctctgtctctctcttttaagcttctgtttggaagctgttttatcacttctggttccctttcagagcacccaggaaaggttgcttttttaggggtgatggtgttttctcctgggaaattcgttttgccacctctgtactgtgtgatcttgagtaatgaaaagaactcctcaattctgggcagtgtttttcacagttcctggtaccctttcatacacatcatctcatctcccaaaaccctgtggaggaggcagtatggtgtgcccattttatagatgataaagctgaggttgggaggggagaggttttcagagttgtggtttccagagcccgtggaggtgtttgtgcaaggttgatgctcagtatttaagcacatgggcccagagagggccagggatttgcatttggtcgcacagcagggtattatcaccaaactctccagagccagtcagcaggtgatcctttctttcccaaacattgactttctaagaaaactttacttccacaaacaggcttagtcttaggtttgaatttatccatatggtttgtgtgtgggtagctctttccttcccactgctgcaggaccggattctccacctcattcatgttgagtggcattttggatgggatccttcctgcttgtaggggctctcctgtgcactggaggaggtttagtgaccctgacccattagatgctagtagcaccccgtagccctgacaaccccaaatatctccagacgttgccaaatatcaaggcaggatagggtgagggaaaatccccctggctgggaactgcagcattagatgacctcagtatgtgaggctgccagaacgcactccccagtctactgcagatggctgttagattcctttccactgtggaattacaatgggtgatactgtgatgactatccttgtgcaagtcttttgggggaatctaggcatgcgtttctgccatgtaggtacctaggagggaatcactaggtcatagggtgtgcataggtttggctttatgggttctgccacaacattttcccaagtagtagtatcacttctcactctcccagccacataggagaattccagttcctcccaatcctcatgagtcttcaatttgaactctaattttttgaaggctgaggcccaactcactttatttttgtgttcccactgcctgacatagtaaatcacagaagataccagttgttaagtgagcacaggcatgcatgctggccttctgcttcaatgtcctacgatcccgatgtcacagcactcggctctcaccatcaggaggcagttacccctcaaggcctgctctttcccatgtccccagtccccagcaaacgcagcagctcatgagctctggggatgaggccacgttttcacattcttggtgagtttcgtatcctgacacagctgtcaaagccaaatgccatcattgtgtgatttcaaagggttactgaattgttttcaagttgtcattctaacaaaacttgtctatcaaatgataatttgtttttccttttatgttgtggttgtatttttacagcttactggaactctttttttttttttttttttttttaagacagagtcttgctctgtcacccaggctggagtgcagcggtgcgatctcggctcactgcaacctccgcttcccgggttcaagcgattctaccacctcagcctcctgagtagctgggattataggcatgcgccaccacacctggctaagttttgtatttttagtagagatgaggtttcagcatgttcgtcagtctggtctcaaactcctgacctcatgatctgcccacctgaatcttttttaagaatatgtttaactcttccagctcttctgcacattccttaaatgttatgcatcttgaaggcaggcactgtgtcctccctggttttttaagcacatgtctcaccatggcatcattgtcatcattgttgttgctgcggtagtcatcaccatgttgctcatctatgacactttatattttcagagtattttaccacgttaccttgttcaagcctctcaataagtcttttttattatcatatattttttagagacagtatctagctctgttgcccaagctggaatgcagcagtacaattatagctcactgcagcctcaaactcctgggctcaagcagtcctcttgcctcagcctcccaagtagctaggaactacaggtccgcaccaccatgcccaactaatttttgtcctctttttgtacagagaatgtcttggacatgttgtccaggcaggcctcaaacttctagtctcaaatgatcctcctgcctcagcctcccaaaatgctttgatttcaggagtggaccacatttcctgacccttccaataagtcttgaaacacaggcagagtggtgaacgtcccccttttactgatgaagaaatggaaagacactgagctaagactcagccacaggacagtactcatcactggcagagtcgagtcccgtcaactgcattaattcagatgctcatgtagaaagtaccatttttcaaaacacaaattcagatatgtaaaaaactgacatttttttccctacacttgacttcaatctctcattctacccaaagatggaaattttaatcaagtcaatggagtcatttctagatttttttcttggtcatttcaggtttaagctcaccattttagattccctcacccccaccccagggtgacacctatgtttggaagggctcatgttgacacagccaagtatgaaggggtccccggagaaaccctggcctgcacactgggagaatggggtggagtcactgaagttcatgcccttggcagggggaggagcctgtcctctcctgttccaggctggagcctgggattcagcctgagaggcgggaatcccatagcaggactctgactttgcagagagtccctgtttcccgttttttccttttcgcccagtaaaccctgcccgtctcacccttcaaagtgtctgcaagcctaatttttcatggtcgtgtgacaaggaccccatttttagctaaggagaaagtcctacagcaatgttagctggagacaggaaggagggagaatctgttttctgccctcggcattcctcccggctggctccagcagctgatgtgtgagtcccactggactctggttgatgcactctccctccccccacagccttgtcttagactgacccacccttatggtacttccttgctttcctcaagggcttgggaaactttcagatgccccctgggtctctctggggccacagagatagcagctcacaggcctgctggtgccgccatattggtagggaaggaaacctccagggccttgctggtcgcttgtgatcatgtccataaactcatcaagtggtgttgctctctccctcaccaccaggtcttggttgagagaggaagggtaggggaaatgtcccctcaattgacaaccttgtttttctctctaaatcccccttatccacttagcctgtggaaccatgtcattttaagctctataacatgaatcttaaagtttcttatttttcctgtattgaaatatactgcctcttaaatcatcattcacccttcctaaatgttatttatgtttatatattgttgatgtgtgtggcatattattgtttaggacataaacattggcttctgcccttcctcttgatacattattatctcagttgaaactctaaagcctgtattttgagactgtcaacctaagaatccttccttttgacattggttgctgtggcctctcttttcagaggcagaaagttcagtttgtgccccaaatggtagaaagaatctctgggcaaaagctgtggagtcctgataagtaagcaacaatgaggaagggtccccaggttgaggaggacctcaggtgggaaaggacacctgagatgctaatcacaaacaacccaagggtacaatgacctccttctgcatgtagccccttccagctccaccctataaaacttccttccaggccctccctctttgcagacagctcctttgctgctgtgcttcccgttgcaatcttgcaacgttttttcatactttctctaataaatctttacctataactgccttggtaaattcctttacatcccgtgacactggctccggatccttgctatccttgacaaaagcaacttcttagaaattatcaaacacagagattaatagacatacataccctgactacagtaccaatgcagaggaaaaggtggaataaggatttaaccctgctgcaaaatacaagacaatttcagagaaagctattccttaggttactttaggaggtttatatgagtgttgagaaacacccaacagtctatctcatgttgaatgtaataggaataatgaatgaaagtaactgatacattgctatctggcctctgggtgccaggggtttgcatactcacacactcttctcatgaggcagcagagctgctgttatttctgtttcacaggcaacttgaaggaacttgaagaccccacagagaggcagtagcagtcaagtttggacctgtctatcagggcatatctcagatttaggacctccctcctggaaaccccaagaagcctgggctcagggatcttttcaattctctctctgccactaaagggtgtgcattttgactcccttttatagtaactgcttaaagtatctgctttcaagctgaaattcccatgggcaatgtggttttattgttactttttaaaaagttaatatattcaaaaaagtaaagcaaggaatattcagagggctgggactccaatgacctggccccttcatcccagggcagtgttaggagagacttggaaaacagggtaagaagaaccagcagcaaaacttcccagtcatgttctcaggagccccagggcttctcagtattagtgaacttcagagccacgtggaaagttggtgagaaatgaccattaacaggcctcacctcatagcttttgactctgtggctctggggtggggctgagaggttaggttcttcacaagctccttattgtgacttcagtgagggaggtttacagacagaccctctgtggacttctgcacaaatctccccttcctgccaagtaacagctcggaggctgagttggggaagggtgctctggattctgaacttgctttgaagcagcttggtgtagtgggacctggggtcgagtatgagcctcatcctaagccagtctgtgcagcgtctctgagcctctgttttatccctcgtaaatcaggaactcacccattcatttccacagccagccatcgggagcgcgtttgtgccaagctttatgtaagctttgggaattcagcagtgagcccacctcccttcatcccccaccccaccaaggagctcgctgagtggggtagggaaatagacaagccagcttgtaggtaagcccaacggaggctgcggagcccaggggagatgctttgcacaatcacagaaggcttccctgaagacctggggctgaagttgaagcctgaaagacctgagagtgagctgagcctgggagagccagtgtgccaagcagagggaacattctggaatggagtgtcagccatcttctgcttttccagaaggcggcagcaggcgaggaggagatggctgtagcgtatgtgccccacagcgtctgccttgatggctatcagaggagggtccaggcaccttcccagagacctttacacctgtgggaagtggaaggctgtggtccccctgcaggatgctatccgctgacactggctggagcttagcatttgtcaggccctgtgctgggcgttttacacacacagacatgcactgtcacatcaactttgtggggagagactattcttttagagaggaagaaatcgtgtctgagaaagattaagccacttgtccgggtcacagtccctgaacagggaagatgggtctgtgtctgactctgaagcccctgcatgtgacttcaagtctcatcttgagacagagccatgtcagctattttaacagaaacatggttttcagaatcccagtctcagcatcacagggcagagcacagaagggtgggtgtagggctcagggacaatgcttcgtcatgaaccccaagctgcttctccccatcctgggtctggaaccagaaggccccatgggaggtcaggtgattgttggctgtggttgggctgggcagagccacggaccaggtgacttcaggacactttggtgctcagaagactggcttagaagggaggctgtgggcacatgagtccagctgctcctaggaccggccgttggatcccaaacccttcagtgcctcatcctatgttgcctttttctcagctgttgccatctggttgtgccttcttctgcatcttcctgcactgcagagcagcccccctccccaaaaaagcaatttccccaattcctttgcacctgggatatttgagatgcaattctgctcctccagctgagggtggtgaggccaagtcgtccccctgctgcatcgagcttttccattctgcactgcagtgaccagccattagctttgtgggagacaaggggtctctacgttggtgagggcttcttgattgcagggtcacagcttctgctgcgtgttctggaagctaatactttcagcagcctctgggtctctgctttcctgatggaggcagatgtgccagattcctgggaggccagttctgccatgtttttgcacagacccggtccagagcctgctcctcatgaacttccagtggcttttgtaagcacttgatgcctcgtgctaatttctttcctttctggaataagtaaagcaacagctctttgtgcttgtaagtgaacccaggtgacttagatcatgcctgtactctttacaccaacactgattccttcttacaggtgagaaaactcaggcccagagtatttcagcatctgttggaggtcacactaattgtcagtgtcagaaccacaacccaaagccagatccctatctcctaccttgttcctccccacctaaccctctgaggatgtgacttgtcactggggtgagagtgcggtctgcagctctgtatctgacttgcaaattataaaatgtgttccacttgtgtgctgaattaattgacgccctgattcttgtttgtttcaacggtgtgattaaaacaatgatgatgattctcccttggggtctatcagataaagtggctgtgattgacagggccctgcacccacacagtggctctgtagagcctgcagagtgggtggcccacactcctgatcctcatccctggcccagagcctaaacagaggacttttttccttcctgaaaagcagaatggtatagagggctccaccattcatcaggcacacattaagcccaggtacttggtccctgggagatacatgccatcttgcaatatccccttgcagtgaggacacccatcacccttgcacagatcaagaaacttcgttcttgaaggtcacagtgtaactgcccaacaagttcttcttacccattgcccagatgaagctgatttattaaaacaagggaaagagtttaatacatgaagagctgggtaaatgagagatcagagttttattattactcacattagcttccttgaaaatttggggactagggtgtttcaaagatagtttgggtgggcaggggctagggaatggatgctgctgattggttgggcatgcaatcacaggggtgtggaaaacagtccttgaggctgagtccactactgggtgggggccacaggtcatgttgagtcaagagttgctggtcctagtggggccatctggtcctcagaaatgcaaaagcctgagaagacatctctaaaggccaatcttaggttttacaatgatgatgttatctgcaggagtaattggggaagtaacaaatcttgcaatggctggaataatgactggtcatcacttaaccacagattcaggcccttctcatcctcctaaccttggtggcctttcattagtgttataaagggggttagttttttgggaagggctattatcatttaaactataaactcaatttctcccaaagttagcttggcccacacccaggaacaaccaagggtggtttggaggttaaacacaagatggagttggttaggtcagatctcttctgtatcataattttctcactgttataagttttgcaaagtcagtttcaacagttaataagcagtgcaaggtggggctgtagttttgacctgcttggactctgagaatataggaaaaataaaactcagtttctcctatccttggctcttacaacacaaaaggcttctgacaccaaatgtatgtgggtttacccccatacagcaagcaaataaccaattctgcagtggacaccagctatgtgtcctctaattcagttcaattcccacactacctggagatagtgtcagattgcacaggttgagggctgagtcccacaagactgtgcctgcctcacttcaataccaattgcaagcccctggtgttttacctttgcttgtgatcactggctataaattgagattcccctcccccttagattcgattaatttgctagagtagctcacacatctcagggaaacacttacttatgtttactgttacaggtagttagataggcatgagtggggcaggagagggctctccccatacccactaggaatatcaggtgatggtctgatgattatcattttatcactaaaaatgatcatttgcagccacagggagacacaatctcctgatgatccacaactattgacattgaaagtgttaactgaatatagacaccagggagaagaaacttcctgggcatgctcactacgagacaagatggcaaagtatgatgttccaggagcttaccactgggaaagggaagaaaacctcagatgggcacgcatacaacttcctaaacacactgcacatgctcagttcccaagggtagggagaacactgcacgcatgcgggtagcccaccctaaggaaagaatcatgggaaagaggcaagcctggaaagtgctaggatgggccgggcgtggtggctcatgcctgtaatcctaacattttgggaggccgaggcaggcggatcgtgaggtcaggagatgagaccatcctggcgaacacggtgaaaccccgtctctactaaaaatacaaaaaatccgccaggtgtggtggcaggcacctactgtagtccgagctactcgagaggctgaggcaggagaatagtgtgaacctgggaggtggctcttgcagtgagccaagattgtgccactgcactccagcctgggtgacagaatgagactccgtctcagaaaaaaaagaaagtgctaggatgaaagttaaatgctctcttctctctttgaccttcaggcaccctcttggatctcttctaagtgaactttccttgctttcctgttctaaagcctttttaaacaaacttccactcctgctctgaaacttgccttggtctcgttttctgctttatgcacgtcagtctaattctttcttctgaagaggcaaggactgaagttcctgcagacccctacagatttgccaccagtaactcggggtaactcggatctcttccaccgctaacgttaccagtgtattacaaggatattacaagggatacagataatgagatgcagagggtggagtataaggaagggatgtggagctctcatgtcctctccaggcaccaccctccagggacctccatgtgttcagctgtctgaagctccctgaacccggtccttgtggggttttacggaagcttcattatggaagcacgattcattaccttcttggccttggtgatcaactcaactcaacattcagccccctccccagccctccccagaggtccagttgggtggagctgaaactgtcaaccctctaatcacatggttggtacccccggcaaccagcccccatccatagtctgtccaggatccccctgccatcagtcaactcattagcatacagaaagtcactcatcctcttggagatcccaaggatgtggggagttgtgtacaggggttgatgggtctgactcttctcatcacctgcttcagggcaaggcaaggcttgactcaggcctgggcaagcaccgcattccatcccctgattacaaagattccatggtggggagtggtgggtagcatgtgatccaaacaaaggaagcctggttctgcctcttctcttgaacttttaggaaagagaaaacccattctttccattggacttaaagacataagcatggggctgctggagttaccatagtcaactcctgtcagagaatgaaacctgcggcaggcagagccacaaagagagaaaagactgattcctggaattcttgatgacatcgttcacaatgctggatccagccccaactgaaaccattgtgaaactgtctccacagggttgacaattgcatcctgggttctggacagaaataattataattaagcattcatcaggctgcccttaggcccacttccttgttactaaaagtcacttagcactagatactgatcatttgcataccattgttcctataggcgagatcccggacattagaatcataaggcttttatttaattcagatgtatttcagacctgaattccagcgaccagtttgaagacccccagagaagaaacaaaatcggctttgcaaaattatagctgaggaaattatgacagtgaaagaaataagacctgactgactccatcttgcttctaacctttaagctgtccttgttcattcctgggcgtgggctaaactaactttgggaaggaattcagttcgtggtttgactctgcaacaaaattggtaacagccctttcctgaaaagacccccttcttgcctggggtctagtttgcctttccaggactaacaaattagctacaagattagaaagtacagtttagggctcatgcagcctctggcttcaagagtcttaattgccccaaattgctcctggagaaaacatcactattgtaaaatctaagatcagtgcctgaggtattttgcagaccctgcactggatggatcagctgaactggctcaaccagttccgccatcccacccaggaacagaagacggcaagaaaacctccttcgacccccgctgattccatctccaacctgactaatcagctctccccacttcccaagcctctaactgccaaattatctttaaaaactctgatccccaaatgcttagggagactgatttgagtaataacaaggctctggtctcttgcacagccagctctgtgtgaattaccctctcaccattgcaattcccctgtcttgataaatcggttctgtctaggcagcaggcaaggtgaacccattgggtggttacagaaagggatccacgtgagaatacagcttcttcctctccctcacccatgacttcaccctgcactcctcgaccaatcaatgatacctgtactttggcctactccaaaacctgaaccccagattcctaggggaggtggagttgaggttttctcccatcacctcattcaatgaccctatgatgaaacctctttctctgctgcaagccggtgtcttggtgtatggactggttgtgtgtgtagggcaatgaacctattatggttacaatcacctccccctgggtttctcagttatgccaaacgatgaattcctcacttttctgcagccagttagaggtggcaccttagtccctttaatttcactatgtcctggctgctacgcagctcttttttccagatttgcctgatgttctgcccaccaaactaagctgcccccaactgatggcttaagcctggattaaactaagctacaaacagctgaattcctcgagagtggccaacctagcctctcttgtgtgacagacactcaagattcaaccagtgacacctcttttatttctccaaattcacttaaggtccagtgtcaccctcttggagatctctctgcccgcttccctggattacctatgagccctggggcatggcaggaaggtgacctgagcaggagacagcgcactgagatttgaaggatgagtctgcattgttcttgttaccgaaccaagcttgagtccacccacctcggtgcagcaaagccaaaccctgacatcaggatttgcagcgagagaaagtgaggcattgattgcagggctccaggcaagcggaatgaggcagctaatgcctaaaacctgaacttccccatggcttacattgtaagtgtttttcaaggtgaggagacagaattacaggcaaagtcataaactgacacatggaagttgcacattggtttaacttaaaaaagcaaagcatctccagcagggtctacaagtcaaaggtgaattcaaagattctttcatttgtgtttgattaaggaagcaaaagtttttctaaaaagttggggtcaacagaaaggaatgttaagccctgggctctgaatatgacttcctccaggcctctcgggcagaaatttagaacaaagaatgggagggtcaccattcagtccttggttccttcttatctgaggtctctgtgccagcagatgccatcttccatgtgatgggggtctgggtttctgaaaaataattcagggacatatatggagatgttatccttagtttctataggaagccgaacattttgtggctctaacttcctgggctattattttcagctattattaccttctcacgtatcaggttgctcatttaattttcaaagctagtgaggtgcctggaatttcccttgaaggaactcaaggttttcctttcattccatgcctggggaagcccagcgggctcctaagaggggtccttgtgtagcaggacgagccacagacaaaacctctcagacactgagttgtagaaggaagggctttattcagctgggagcatcggcaagctactgtcttaaaatccgagctcctcaagtgcacaatttctgtcccttttaagggctcacaatgctacagacttcacatgaaagggtcgtgattgattgagcaatctaggggatatgtgacagaggtttcatgccctggtagtcagagtgaaacagaacagggcagggagtatcacaatgttccttcatacaatgtcgggaatctatggataatatcggtttctaagtcatgagttgatttttaactactaggtttaggccaggcaggcctaggtccggttttgggcctggcgcggggctgcctgtctttgatttcacttccttgtttttttcttaaaacaggtactgagtataaaacaatataaaacaatatgagagggtctctctcttccctcacttgctccatcacattttatcaaagggagcaggaggagtgcatttcaggggaatatcagcttgtgtgaaggaagacacaaatgagagagcaggggaaatggcttggagttttaaggtagagtgcagggagtccaatagcatttttaaaagattttccactaaaatatcataaacatagagacaagtgtgcgtggcctaagtacaaagctcgatgaattctcaccaagagaacacatccaggtcacacacatatggatccagaaacagaacacaaccaggaacccgtgaaccttcaggtccctttccagtcaccgtgcttcccagggcaatgtctatcctgacttctcacacccacttcagggcgtaattttgcctacttttaacttcatggaaacggaaccaaataacttgtgctctctagtgcctggtttctctcattcaacactgtgagatgcgtccttatcaacaacacacgtagctgtacgtcgtttgctctcattgatataaggcaggggtcagcaaactctttttgtaaagagcgacagtaaatatttgaagcatcactggtcctttgatctctgtcccagctcaatttttctgttatgacatgaaagcagccataggaaatatttaaatcaatgaatggagctgaattttgtaaataaaattttgtaagtctcattcatcgaatgaactttattttgtaaataaagtttcgatgaatgaaactttatctacaaaaattggcagcctggattacaaacatagtttgccagctccgtgctctacagtattctgttgtgtgaatataccaccatttgttcatctcatctactgatgaacttcaaggtaggctttagtttgggacgacttacgcatagtgctgccgtgaacattcttgtacgtgtgtttgttgaacgtgtccacatttctgttgggtatgttccaagaggtaggattgctgggttgaaacttatacatctgttcagctttagaagatgctgccaaacagttttgcaaagtggtggtaccagttgcatctctccctccccatgaccagcagtggatgcatgttccagttgcttcacttccttaatgtgtgatgttttcaccttaacctttcaggtggatgtgtacttgtatcattttatggttttaatttgcatttccctgataaataatgaagctgagcagtttttcatatgtttacagccatttggggtattggctttgtgaaatgcctgttccaataacatttgatacctttaacttgcataaattacattctgccttgaaaataaatctggcagtctcctttggagcgtttggtcttctttcttatctaaacttaggagcttttaagggatgatgttgtgcatatgttactactttttctttaattccagaatctaatgtgagatgtttgccctctcaatgtctgtttcaggttctttttccccttaagaaattttgatcttgttcttgcatgtgtcactaactgttttgaaattcagagatccaagaggcctgaactttcagaaatcacggtttcacagagtttagaaggtgagagcctttctgagcctcagacaaagagggcttgaggatatacactgaggacatcactgaacaggccatcactgaacttgaacttgacatcactgaaccagcccaggcatctgagtctaggtgtgagagtaacctcattcctctatcttccctctcttcttgctctgggttctgaagatcctcaatgaataatggcaagttatactagtcagaggagagaaaattttcaaatggggcaggttgagaataaatctggctgagcgaagaaaattaattagtaatagtaaatataatttggcagattctgaagtagcttactgtattagtccattttcatactgctatgaagaaataactgagatggggtaatttataaagaaaaagaggtttaatggactcagttccacatgtctggggaggcctcacaatcatggcaaaaggtgaaggaggagcaaaggcacatcttacatgggggcagcaagaaaacatgtgcaggggaactgccctttataaaaccatcagatctcatgagacttattcactatcacgagaacagcacaggaaaacccgcccccatgactcagttacctcccactgggtccctcccacgaaacatgcaaaacatggggattatgggagttacaattcaagatgagatttgggtgagaacacagccaaaccatatcacttactgtgtgtgtgtgtgtgtgtgtgtgtgtgtgtgtgtgtgtgtgtgtgtgtgtgagagagagagagagagtgagagattgagagattgagaatgtgactgatagctgtcatataactatggattctgcaatgcatataaagcctgtttgccctgtggtccagcctgatacacagtctataaaaaaaaaattgtttaccaaccccaaactaatttagggtaatttgaatctttattggagccttctgaatagcatatcaaagaaggaacccatccataatatataataaaacctctttttaaaagttcttttccaattcttctttcttcaacacacaatagctgccacgaagttattttctgtttttcatttccacatttatacaacatgaaacaaacaaaaaccctatctctaatccaaccttcatgggctctttcatttttgattcctctttcttatttccctaaatctattcttctccccctagtagtttttagttttctcgttttctactgtaattcccacgagtccctcctcatctcatctcccttattgactatctcaattgataaagaaaaggtccagtaatcaatcagacaggattccttctcagagggtggaagatgagagaaaagacaaagctggtaggattgtctttggtatttaagataaaagaggctatgagtcctctcttgcatatgttcatccttgtcacccttacgttctgggtccatgcaagtacatttctttttgcattttttaaaaaaacaaaaattaagttgcttttagaggagacatctcttatttgagcctcacaagtaaggacaatgagtcagtgaccactgtggacacttccatttaatgcttccactcaccaaggactcatcatgggacaagtatggcacaggtgagtgtcggggtatccataagaaccctcccagattctgttattttccaggagtgctcataagactcagcatatagttttgcacatggctatgacttttatagtgaaaggataccgagcaaaatcagtacatggaaaaggcactgagaactaagtacagaagaagccaggtggaagcttacagagctctctccccctagagctgcccaggacacacaggatttccttagcaatgaattgtaacaacacctgtgaactgctcattagagactcagtgtccagggtttttattgggggctggtcacatagacaccatctgcctgggatgtgacaacattcccagaaggaaagcaggtgtccagcataaaccatgctgtttgtgcaaatggtttagtcacagtgaactactcttgtcaggaagtggtgggaactctcttgaaatccaccttcccagatgccagccccaggccaagccttgcagtcaggcctgctgtggtgactggcttttgcacagtgagacatttaaagttaatgaaccttgccagcaaccccaggaggccgtacaatcattattcccatttggagaaaatgaaacttaggctcatagagtggggagaacttttctgctgagagctaataagtggtaaaacctagacatggattatatgaaattacagaccatgtcgttttcatcatgccatactgtctcttcattattccattatttcagtactgaattatttgatagctaacattcctgggtcttttctatggggcagccattgttttaagtgtttttcctacaacagcttatttaagcctcaccctatgagatcatgcattattgctatcctcactttacagatgaggaaactgaggcacagagatttaaaaatgtacacaaggtcataataatggtggccacttgctgggtgctaccgatatcccaactcatgttcctcctgcctttatttattagctctgctgggcagcttctcatgggtagcctctgtacagaaaagatcaattagagatgaatcttaataaagtaaaggcagtttacgaagaaaataaaacactctaggaggcaaggccgataaatgagtccaggaattcagcagaaagtgagaccaactgcttccagcagaggcaaatgacaactcattcgagtccagaaagaggagagcaagcgaacctccagcctcagcttccatgaccttccaatacaaagtgccctgctctgttaggtggaaacctgtcctgtggaacttcttcctcactctcccccaaacctacccttgtccaaccctagcccccacccattagagggaggtatttactgagggaatagggactccttggaatttttgtcccagaaaagatgtagacctagctgaggttgcagacgctaagaatttatccaaggccagagttgcaaactcgtgtctctaacacatgggcacgtgcaggtttcaataggaaagcaagagagaaggccacgtggccagaggactgctcctggatccactgagccactgtcattgttgggtcctgcttctgtgggccatgcagtcatgcacgctgtacctgccctaaagtgacatcgttggtgaaacatacctctcccacgcccctggagaaagtcaacagctagagttgactgtgtagattctagaaagtaatgttcagtgttctcatgcaaatagtgcaatgtaaggtggtgttgagcttatttttgcggcagaattaatgttcatttagagcatcgtgcagtctgaaggggacactgaagtttttctgttaaatttttctgcagtttagtgggaaattaaatacagtagcaggaattgccaatttggggatttgcaaaggactctggaggcagcccttgtgaagcatgcggaattcttttaacagcaaatgtgatgcgcagtggagaggcggtttctgttttctgtctcccttaaagccccatccacccagccaagcacccagcacaaggatgtgactagaccctttccaacactaaggaaccgaggacaacaggctgccactttgatttttaaattcaggccggccgggcggggtggctgacgcctgtaatcccagcacttagggaggccgaggcgggcggatcacctggaggtcaggagttcgagaccagcctcaacatgagaaaccccgtctctactaaaaatacaaaattagccgggcgtggtggttcatgcctgtaatcccagctactcgggaggctgaggcaggagaattgcttgaacctgggaggcagaggttgcggtgagccgagatcgtgccattgcactccagcctgggcaacaagagcgaaactccatctcaaaaaaaaaaaaaaaaaaaacaacaaaaaaacttcaggccaataactttggccagcctactttccctctccagacctcagtttcctaatctgcaaaacgggaggtaaccatgctccctaactctggtaaaatgagattgcgaatgcggaacactagaatctggcactgggaagcgtttcataaacattaggtgctgcttccgccgatattattgtgaccatgaagtgacagtacgcaccaccggtgcagcccagtgatggacacaggagaggcttctggtgtcagctcaggggaatctggtaccatttttgtctctaagggtagacagtgggcttatgtaacctacttgctttggagcaagctgactccacccccttgcttccatggtaggccctgattggtttacaggcatccacgcagttcatttttctgcccagtcactggttcatgagcaagcatgtgaccttgaaggtctaatcagggtgcatctagtttgggcccccgtttcccgggatgtagatggggaaaggtgtcgcccctgggatgcagctggccctgctgaggaggctgctggcatggctgtgctgagagatggtcacagttggcgttaaaatcacagatggcattgttaagccattgggtcatccagtccagaagctggatcttacctgctctttctatttgcatgaaacaaatcttctacattgccccagccagtttaagttgcatttctcggccacttggaactcaaaacttcctgtcacgatgcatttctatctgcaatgatctgctttcatatctgccttagagaggacagtgacctcttttattatcctctgtgttcccagcttccagtcagtgtctaggacacctcaggcacttaattattgtttgtcgaatctataggacatgactcttacctcatagaaccttcaatctcattgaaaaatgagatgcgtggatatgaatctgaataagatgtgaggccagctgtgattaaaccccaacgctagttctccagacagtgttgtcatacttaatcctcctccttgaagcaatgcggctgtgaatgaacaggtcaaaataccagatgacaaacctattcataggcccaactgggctttggtatacaaaagtcatagggaggaggggaagcttttttccttaaaaggtaagttggcatcattattgaaagcaggagacgggctccaagcagagtatccattagaacatgtttggttcaaatgggacagaaaagtggttgcaaaattgcatatgccaaaaaaaaaaaaaaaagaaagaattgattgctttatgtgcatgaaaacccccaaggatgtgttcttcagggacacagatgatgtgaacagaagagcagcttctcaccatccctctgccctgcctttctcggggttggcttccatcccttgctctgcctgggagaaagatgaggacagcaacccccacctgcacatccttgtatgtgcccagtaagtgagaacgacctgtggggtccttctgtgtcattggctcaggtggccaatctcagaaccaaccgctgtggccaagggggatgttatgttttgattagtttgggctttgatcatatttgttttcgagagggagtttcgctcttgttgcccaggctggagtgcagtggtgcgatctcggctcactacaacctccacctctgaggttctagcaattctcctgcctcagcctcctgaatagctgggattgcaggtgcccaccaccacgcctggctaattttttgtatttttagtagagacagggtttcaccacgttggccaggctggtgtcaaactcttgacctcaggtgatccacccacctcagcctcccaaagtgctgcaattacaggtgtgaaccaccacagctggcctgctttatctctttggttgagcccaattgttgatttactcagacactgaagacactgtcaccagaagaaaggtgaggggctgctgggacaaaagcaagagttgtctacagcacacagaggtgtccactgcacttggccatggatgggaagaatggaagcaaataggttaccccattctcacagcacacgctggggaaggccctgtgctgggaacacaaggacacacgatagacggggcctggctttaaggagtgctcagcccaggggacaggtatgagctttattcctgtttggcctggaataaggatgaggcacagagctgggctgggtctctggtgtgccctagcccctagtctacagatataaaaagcaggaagacaaaaatccctccagcccttatgacagtcaggcgcgaacttgcttggtaaacttgggccagcttcttgtaatttctgcattggttttgttatctttcacatcaggattataatggctctggtctcccagagctatagatggggagaaaagatgcaatgcgtggaaaacactgagcatagcaccaggttccaagtgagggctcaacacatgttaactctattatgtttccttggggcaatggtgatagtatggaggataaatcagcctgtaatgtgtttctttacatagttactggaggattgacggggaagcaattggagtcagactgtctggttttgaatttatagtcgaccacttattagctattggacaccttaacctttctagacctcagttttcacatctgtccaatgggaatatttatagactatatcccataagcctgtgtgtgtgtgtgtgtgtgtgtgtgtgtgtgcacgtgtgtgtgtgtgtgcatagtgaaatactctgtatatcttcattgttattcttctttccgtccttcctaattgggaagcaagactttgatttatcagtagcttcctgaccatctgactcagtgcccagcatgtaggaggtgctcagtgagcaatagtttcatgaaaccgtaaagtattgcacagtgcaatggatgggaccctctgttgggctggtgaacacaggctacccttcttgatacttaacattagttaggatttaaatgcagtcgttgttacaaagaaaccagaaaaacagtagctgaatcagttgattatttctctgtcacctgagagtctggatgagacagtccagagctcgaacaatggcttgatggcgtcggggcccagactccttcccagttgtggctccatgctgcctggggtacttctgtcatctgaatggctcaagatggcatcccacacgtctgtgctccagagtggagagggagatggtaaagaggtgcattatttcccctcaaagccgtcccactggcagaacttagtcacgtggccaggcctggctgccaaggaggctggccggtgtgagtttgatttgagtgtctgtgtgctccagcaaacactggggactctgttgagggacaagtagagaatggatataggggcacaattagcagtctgtgcccagggctagagcactgccttatggggggaaaagaacccagacaaaaggggagctgggattggctcagagagtggtgtccctcagctagaggaaagcaatggggaaggttctcattcacaagccaacatcgcctctgcccttctgtcaggggccactgggacccaggaccccaggatccccacccttcttgctcctcagcttcatgaccctgcaaaggccctgcctgggtaacagagagagctagcttcattcagtgtcggaccctacctcccatcaaggagattggggggtgaggttgtggacaaaaagcatgcttatacactgttggtgggagggtaaattagttcaaccattgtggaaagtaatgtggtgattctccaaagacctaaagacagaactactatttggtccagcaatcccactgctgggtatatacccagaggaatataaatcattctaccataaagatacatgtacacaaatgttcactgcagcactattcgcaatagtaaagacacagactcaacctaaatgccctaaagtggtagactagataaagaaaatgtaggacagatacaccatggaatactatgcagctatgaaaaagaatgtggtcatgtcctttgcagaaacatggatggagctggaggccattatccttagcaaactaatgcaggaacagaaaaatactgcattttctcacttataagtgggagctaagtgatgagaacacatggacacatagaggggaacaacagacactggggccggtcagaggttgaagggtggggggagggagaggatcaggaaaaatttctaatggttactaggcttaatacctgggcaatgaaataatatgtgtaacaaataaaagtttacctatatataaacctataaataaaattacctatataagtttacctatataaaccatgacataagtttacctatataacacaactgctttttaaacttttttaaaagttaaaaacaaaagatgggggtaactcaggccttccctagagagctctggaggaacccaagggggcactgagcctctgtttcctctctgagacgaaaatgtggcttctgggacagggacaggcagaaatttggaagcaagagaaaatcgtttctctaggcaacacctctttaaagacagagcttgctttgtattccactgggcagcctagttcctgcgcaaggcctggcgcatagcaggcatgcagtggtgtttgaacaaattcttgcaattttttcccactccttagacttctaagacttgacttccgggggttactactgccttaggatttattttgatcattctccatcatgaaacccagtgcctggcatataggaggtgctcagctgtttggttatcctccttaaacacgttgtgaaccatcagactccagagaagagacggtctctacccttccatcctcctttctatggagtcagggctgacggatttttatacatacagaagggagagcaatgataatagtgttaattatagtgatcccctgtgagcaccgactctttgctggactcttgccaggcacttgatgtgttctttctaatcctccagcaacccttcaatgggggtaacattatcccattttctagacgaggcaactgagatgtggagatgatgagtcattggctcattcctttagagcatgggttggcaaactacagcctgtgggtcaaatccagcccactacttgtttctataaataaagttttattggcacacagccacagccattcacttacataacatctacagctgctttctcactataacagcagagttgagtagtttcgacagagaccgtatggcccacaaagcctaaaatatttacgatctgggcctttacagaaaaagtttgcctgatttagaagaaatgtttgaataccttctctttgtcgggctagaaagcagatcaggaaaggccttgcaagccatggtgaggatgtgagacttgttctgctggcaaaggattgcagctgcaggggtttgcacagagcagggacaggaggagatctgtgtttcaggacatccagtgtggccactgagtggagaatttcagagagcaagcatgcgtggagtcagggaaacccgtgaggagcttgctgaaacaattcaggcgagagaagactgggctggaagtcacagtgggatgagagatttaggaaggagagtcagcagttgatgactgctactcagaggtgaggagaggggaatcagggaaattatctaaacttgggggtgattagaaatgtcagttactgagctaggaaacacaggaggaggaggagcaggagcttgtgtggggagcggggagtttagtgagggaggtgttgagttggaggtgtctgtaggatgtctctgcagggatgtacagcaggaggaagtggggctgtgggtttggagggacaggtgtgcataggaaggtggagattgaggattcgccagcagagagatgtccccaggatgagctgaacacctgggcgagattcagagctgggctctgttttttggaaacccacattctggcagctctcgcctggtgcttgccctcatgtcctcttgagaccatctcttgaccatctcttgagcatctcttgagctgtagccagaggggagttgagagccaagcaaattccaactcagcctacaaacagccaggccctagcccaggtctcagcagcagggagagcctgtctcaagtcaaagatcccaggagagctggagctgtcactcttcccgagaagttgacacctgtcatgtggatgaggccttttttggtgcctcgcatccccagctgtgtttctgcgctgaaggtggccctggggagctgggctgcacccccacagggccatttttctgatgctgtttctttttgtgggctcaggtgagcacttgacagtggagagtacaggagcagtccccatatggcccctgggtaccatcttaggtgtttgcagcatccagaaggcgggcctggtgcaggcctggggacggatggcaagtgggaggcatcccgcacgctggaaatgttttgcacctttgagaaggctaaggaagtcttctttttcctccagagatatgactagtagcttaggtttattttttgccttgaaagatttttaaggctgcctgagtcttggggtgaatggaagcagggttctcaaagcagatgggtacctccagagagaacccccccatctgggaacacgctggtttttctagagaaagccctgctggctctctggtctagtctaccctggagttctgtgggctctcctccttctggtggagaatgttgcttttatctgccatgggacagtgtgggaaaagatggtggtggggctggtagactctgtcctcagcagagttggaaagttggggaaaggtacccctctccctacagagggcactctccaccccttctcccccactggctgcctctttgcaggttccattaatcagctactgactgatgcttgctctacaagtcagagggcacaagagggaacttgttggcttgggtctttgaacatctcagaggtagtgggtacttcaggtaaagctggatccagaccattagagatctgtctctctctgtctctgggttctgctgtcatctgtgctggcttcattctcaggcaggctgtccccatgctgtgaggagatggctgtcacctcctggcttatatctacctcacttggtgttgctaacagaaagacagcatctctgctaattaacttgccacaaaagtcctgggattcaatgtccatggccccagctggagtcacatggccattgctgaccagtccctatggccaagaaaatgctgtgttctcactgggggtgggggcaactccatctgaacggccgggactgcgtatgggggaggcgtggctcttcagaggcggcattagggttgtgttaccaggagtggtgtgatgggcaggcagaaataacagacagatgttatgcctggtgcctctgagaatcatgatgtgcaaatgtcacctgtgaagtggactggctcccaagacacacaaaagtaggaagtcacatatgaagaagcttatgtggaatgtcacaaacaaggaagctagctgcacagttagaccagcagggcttgtgggtgggagggggctggggtgcagggaatagaggatccagaacctgggggtgagggcggggggtggaggggactcacctccctctcccatccttctcttctccttccctcccttcctcctttctttttcttctctctctccccaaatatcggagtgcctgttctgtgccaggtacaccattcaccaccagggacacagaaatgagccagatggaaacgttccctgcctcttagtgctgatattcctgggggagctagataataagcacacaaacaaataaatgagactattttagagagatgagctagcactgactcacgtatggtcagtgcattcactagggtggtcatggagggcttctccgaggaggtgacatttgggtagagactgatgaggaggagccagccctggaagagcctgcgtgggggagggagggacagtgagctggtgatctcaagctaggaaagtgcctgggcactcaagagactggcctcagcccacatgggtggagcctggggatgcggaaggtgctggagcctggagtagtgctgagcagtggcacagtggtgacagtcagtttcagggccactgggtgggactgatcattgctgcctcctggtctggatgatgggcagggaggatatgggcccatcctcaccgaggagaaggaggagaactaaagaccttcagtgccaactctggaccagctgccatgtaccgtggtgtatatgtgcccttcccttccagaatgacccatggaggggtacagtccccgttttacagatgaagaaaccaaggctcagagacgtgagaggcccaaggcctcttgccagcctgtagtggagctcgtatttgaactcaggtctttgcaactcccaaactctttctcccacactgaactgcctctcaccaagcgatggtgacgaccaaaataaaccccacgcggcgttcgaatgaggcagcggtccaaaagtgattcatagcttctctttccttcccactgccgttcgtttcctttcttaatttccacatttctgagctgaaacaggctggtatttaaacttgccagtagcagatggggggtgggggtggggcagccttggcccctcagagcacgaatgatggaggctggacccacctgcctgccgaagctggctgagcccccaaggccaggttcccccaccctcagcctaaaaggtggagaggagggagcacacgctaaggtaccccacttccccagctcctgaaatggtttcgaagcaggagagaaggtatgcttttcctagcatgtaaatgtcactttactccatgccttcctttttttatcagtgcgattggaaagtggctgctatctccaaaggaaccgtgatgctttcatcttccaaatgccatcacagtcgggaccgacacagggtttaatagcagattatttttacagcttgctctccccggcatctttgaatcctgatgccatctgagccagacacgtgcaaggggaagtggaagattgccatcataagcatctcatgtgtcctgcatgatgggaactttgagggcccgttcaagggaatccctaattctaggattggacacaggtttctgaaatcagctcaagcttgagagatttcatgcggaagagtttctgtttcacctggacgttttgtagtgagtgtctgttgatttttcctgtccagctgcttctgaaaatagaatctcaattcccgtgaggtgttgctgccgcctctacccttggttcatgcattttgggcggggaggaaattcaccccttcctccaatttttaggagtgggcaaattaaccaggtctggccagtcaacatattctttccctgaaccaccttgataattcacatgtgaacaagaaaccccagccaggccagcaagatttgatttggagacttttatgaaaattaccaggagagaaaagtttgtcctaccaggaagtggttgaatgattaagatggaaaccaggagctactggtggccagtgtcctaggggagagcctcctttttaatgaggctgacacagaggaaagcagagctgagacttagaggagagtgagggaaagatgggttctgatggtatcacttgagcacctggaatcagccattcctgaagctggatgattggacctgatgattctatgagttcataaatttggtttgatggcaagggtattgactaatgcctattggcatgatcttggctgcataaagcaatcttgtcgctgagttcaaccccctcacttgttgctgcaaaggtatagctcatagcaagaaggaaggctgtgatcaagacagacatcattccctcccacccatgcagactccgtgggggccctctctcagaggttcatctgctctctggggatccctgagaaggatattcaaagtaaaaaatttagagcaacctgctgggacaaagttggcaattggggaggaggggctggattctggaagccacggagtgaagaggcctccagtggccccctcccctgctttaacataggggcctcagccctcccaggttgcttatatcagggggctcttacaagcactgtcactctgctaatccactcccagaattgcactttgactaagcaaatgtttactgagaactgtgctgggcactgggagttggcaggcttgggtctgggtactccatctttgccccttagtaactgtgtggtgttgagcacagtccctaacctcttggagctttcaagtcctcatctgtagaatgggaataacaatatagtctgtttccagggattgtcaggaggactcagtgctcagccctgagtctggcacacagtaagcaaccatgagcattcaccggcattactattccagaggtggaataatcccagtcctcttgtgtatgtgtgtttttttgaggggaaggtggcttgagttttaaagggggagagttatatgcacagaagattttttatgttgtatagttgatgataagtgagcataagccacaagtccaagcagctctaggagcccagaaggagaggtgtctgaccacaaagtgatattcagggaaggcttcctggaggaagtgactgctgagctgagtcttgaggattgaataggagttggcgcagagagggaagatgcttagcagagtgaaatgtgtatgtttagcagcatagcagggataaatacttagagccacggcatgaacaggaactgtgcccgatgttgttactggacagtgggatatgatggaatgagcatgagagggtgagattggagagactggccgggaaataggatgggaagagtttggggtggatcctgagggcagtgggatccactagagtattttcttttcctttcttttttccttttattattattattattatttttttttttttgagacagagtctcgctctgtcacccaggctggaagtgcagtggtgcagtctcagctaactgcagcctccacctcctgggttcaagcgattttcctgcctcagcctcctgagtagctgggactacaggcatgcgccaccatgcccggctaattttttgtatttttagtagagatggggtttcaccgtgttggccaggatggtctcgatctcctgaccttgtgatctgcccacctcggcctcccaaagtgctgggattataggcgtgaaccaccgagcccagccccattagaggattttctaataagggagcagcatgattagatttgagctttaggagtccacctagacactgttttgtaggaagattggaggggaagcgagggggagatgtgttggtgcaccgggacaaatggtagtgaggtccaaaaccgggcagaggtgacagtctggaagtaaggggcagagcctggggtatgtgggagtggactaaacaccaaagcaccacactccgctccggtccgtggcttcccaggaccatgatttgagacacatcacatatgtcttatagaatgatgggttgtttaccagaaactctaaatgctgacatcatctctccccaaattagcctcatctttctcagccaatctgccatatctgggcatgttttgccttgatcaactgttgtcttattttctctttttttcctccccaaatactgatcccaactcttagctacaggactgatcctccaagttctcctggaatcatagcaaacatttatctttctgtgcccctgtacatcttaccaaatgctctcccttgcagtatcccagtttgtcttcacagaaaccccaggtagtaagtcgaatgaatattatggcacctattttagagataaaagaacaaaacagctgagaatttaagtgcccaagatcatacagtaaatgccttttttcaaaaaaaaataagcgttcggaataattttagatgtatggaaaagttgcaaagatagtacaaaaagtcctcacatacccttcacccagttttcccttttgacatcttatatcactgtggtacgtttgtcacaactaagaaacaaacattgctacatgaggccggctgaataattaggccccccaaagatgtctatgtcctaatccctggaagctacaaatgcgtccccctacgtagcaaagggactttgaggatatgattaagctaaagatcttgagatgagtagattatcctggatgacctgggtgggcccagaataatcaccagggtccttgtaagagggagaccacagacttagggtcagaaagagaagaagtaaagatggaaatgaaacaggtcagagaggagagatgttcagctgctggctttgaagatggaggaaggagccacaagccaaggaatgtaggtggtctacacaagctattataaaaaaggcaaggagatggcctctcttctggagcctccagaaggaactggccctgctgacaccttgactttagccagtgagacccatttcagccttgtgttagtctgtacttgtattggtataaagaactactgagactggataatttatgtagaaaagaggtttaattgactattccacaggctgtacagaaagcatggctggggaagccataggaatcttacaatcatggtggaaagcaaaggggaagcaggcacatctttacatggcagagcaggagagagagggaggtgctacacactgttagaccatcagctctcgtgagaactcacgctcatgagaagagcaaggtggaagtcctcccacatgatccaatcacctcccacgaggcctctcctccaacaatgcggattacaattcgacatgagatttgggcagggacagaaatccaaaccatatcaagcctccaaaactataacaatacatttgtgttgttttaagccgttaagtccttgacagtttgttacagcagcaacaatgaatgaatacagtacattactaaaaacgaaaactgcacactttctttagatttcaccagttttcccattaatgttctctgtttgttctaggacaagcagggtgccacgttgcatttggtcatcatgtccccctgtctctctggtctgtggcagtttcttggtcttttcttgtttctcacgaccctggcagttttgaggagtacctgccaggcatctggaggatgttccccaatctgatgttgtctgtttttcttataattagaccagggttatgagatcccactcttttctaatctcccagaattgtgtctgtgctaccctctgttgattcaagctctccaagcttgctccttactccatagccatgtatctgaatggatcattccactcaatatgagcccattcaccttgttggttattatgctgttgtcttcaacttgaagatcaactagggaatttatggcactatttatagtttttggcaattgtttgaagtttggaataaggtttacaaatatatgtcagagctatgtgagcctctgatttttagtgtggagttttaaatttctgttttatggtaggattttgttgttgttattcatttctttgttttattttctgtgcaggtacttgtgatggttaattttatgtatcaacctaactagactaagggatgcctagatatagctgggaaaacattatttccgtgtgtgtctgcgaggtgtctcaggaagagattagcatttgaataggtagacccaggaaagaaaatcaccctcgttatgcttttgtttgggtgttgagatagagtctcactgtgttgcccaggctggagtgcactggcgtgacctcagctcactgcaacctccggctcccaggttcaagcgattctcctgcttcagcctcccaagtggctgggattacagacatgtgccaccacgcccgactaattttttgtatttttagtagagacagagtttcaccgtattggccaggctggtctccaactcctaacctcaagtaattggcctgcctcggccttccaaagtgctgggattacaggcatgagccgccacgccaggcccaccctcactatgtaatgggcctcattcgattccttgagggcccagatagaacaaaaaggcagagaaagggcaaactggctctcgcttcctgaagacaggaatacctgtcttctgcctttgaactttggacctcctcattgtcaggcctcaggaatcagactggaaattatgccactggctcccctggacctcaggccttaggaatcacactgaactacaccagtaattgttttcctcgtgctccagcttgcagacagcagatggcaggacttcttggcctccataatcatgtgagccaattcccataagaaatctcctcttatatatctatacatatcctgttggttttgtttctctggagaacgctgacaaataagcattggattaaaaaaaaattttttgagacagagtctcactctgttgcccaggctgaagtacagtgatgtgatctcagctcactgcaacctctgcctcttgggttctaacaattctcatgcctcagcctcccaagtagctgggattacaggtgtgggccaccacacccagctaatttttgcatttttagtagagatgagatttcaccatgttgaccaggctggtctcaaactctgggcctcaagtgatcctcccacacctgccttccccaagtgctgggattataggcgtgagccacccactgcacctgacccccaggattaaattttaaaagagttttgaaatacaacaaggtccatcttttgctggggttggtacaataaggtggcatggcaggtgtggtgagctggcatacaccatccatttcaccttcatcctagccggtcttcccatctgtagaggcaagaaagtgaccaactacatgtcccagagcctcttgctgctgggcctcaagatgttattgaggttgggccagtcagatacacacaaatgagatttgctcctcctttcaggaagttttctgtgttctattttaatattaagtttctatgaccttagcacatgttcatggaagtgtctgttggacagactataagggtattagtttcaaaagttagtctgtacatttgatgcatattcaatgtgtatgcagacagggcgtggtggctcaccctggtaatcccagcattttgggaggttgagacaggaggatcactctaaccaggagtttgagaccaacctgggcaacatagtgggaccccctcacacaccccaaccccatctggtcaaaaaataaataaaaattagccaggcacagtggcatgcacctgtagtcccagctacatgggaagctgaggcaagaggatcacttgagcctgggaggttgaggctatggtgagtcatgatcatgtcactgcactccagcctaggcaacagagtgagaccctgtctcaaaaatgaatgaatgaacgaatgtatatacagatatatttccattgactaatgaccagaaactcttactctaacaaaaactttgctcaagccactgaattatgcacagtgcaaaacaaaacaaaacaaaaaaactgtgtttggctacatacagcagaagcctgactaatagtggcttaaacaaatagatgtatgttggagttggggacagatttgttgtttcacataagatgtccagaggtgggcaatactggttttaattcagctgctcgaataggatgtgaggaacctaggcattttcttttttatgtctttctactttgccttctttagcattttagctttttgcctcatgatcacaaaatggctcctgtagctccagacctcacaactatgctcaaagcaagaaggagaaaagaagaaaaggcagccttagcatagctacattttccattacaagggcaaagcctttcccagaaggccccacagcagacttccccttggtcttcttggtcagaagtaagtcatgggaccacccctaactgcaaaggattctgagaaatttagggggcatgattgtcacaactggcttaagttaatcacaacctattttgggggtgggggatggctaagcacattgtctccctgacaaagtgagggtactgttagcaaggacggagggagaatgattacagggcagacaatgaaccttgcctgccataccagcaaacatttctgatcacctcttgggagtcaaacactgtgttaggctttctaagggattcaaaaaagtataagaaacattcaccaccttcaagtcctccagtcaaggaggtggttttatcaggactgtctcccgtgcaaggggatagaaactctactcaaactgacctaagaagaaaggcgtttataggttcatgtaaatgaaaaaccagggtgcatttggcttcaggcatggctggatccaggtatttatacgatttcaaaaaataaaaaaataaagattcatctctgggctctgccttcctttctgctagcttggtttttaggcaagctcttctcatcgagtgacaaggacgctgtccacaattctagacctacatcccacaagctcagtagcaataggcacagctcaggttgtacagctcaggtggtaccttcagttctgatgggctgggcctgagttctgcattcaccaggacctaagggtggggtcagccccacccaaaccccatagactgagagtggttgcctacctgcagggaaactgcaattctgttctagcaaaaaaggagggataaacactgggtgggggaaaaaatgtgatttctctacagaagagaatttaaagaggtgagaaagtcctagtgattcatcaacaaacgattagtcccaggaggtttcagctgtccttcctgcagctgacagactctgcttggtgacacacacactaggctagatgtgtgttgagaacatccttgtttccatgcttcttctgctctgggtttggccagagaggtcccaaggtctcattgccccatttgcatagaatgtcaacatgactaagcacacatcagtgatggtgattttacagttatattaggtataaaagctggcccaaagcagcacaagcaatgaaaattcaacagcctcaaaatctcatgatcagggatgtcggtaaagtgagctcagctctggagtttgatctcgtgtggggtgcttggtaatgggtgataattgcagcttgctgctttcttcttcacctaagttagaatcaggtaccttctgcccagatcttgcagctactgttgagtggcccttgccaagagacgtagaggtctatgcctatttcctcatctgtaaacctgggatacctgtaacaataggttttatttcccagggttaaaatctcagggtgctgtagggaggattcaattagaatatgcatgttcaccccttagcccagtgcccgaccctgagggagcttctcatctctgctgttgggaggacgaggagttgcatgttctgccacgaaagtgcgttgtattcacgcaggcactacttacaaggctttacatacatcagctcatctaacccagcccagctggtactgtcatccctattgttcagatgaattaactggctttgcaaaggccacacagtttgctcaaggctgcatagatctgtcatagcagagccgggactggagcccagccttccaatggcaactaccagggccagccccagggggaggcaagtgaggcaccagccccacctgcaaaatgtaagggggcctaaaagcccagtcatcaagataaattatatttgaatgcactattttaaaaaatcaaaattaatgcaaaaaggatccatggcaaatatccatgaggcaaaatattatgtttgcaaatgaaaacaggattattctggctgattttttcttttgctcagactgtcatagggggcctggcctggtgctgggactgcattcccagtgctggctgcattcgcaagcaggtgccccttcaggtggcagaggtgacccctgaagcctcttccaacaagctcagcggagaggacgcctcccctctgaaaggcaagcagagctgcggaggtactcctcactggatcatatgcagggacagttgggaaggatggcacctcccaaaatgttgaggtgctgtttcaattataaaaagaggactgagtgttaaatatgcaaacggcacagactctactgcaagtgggcagtggctaatcttaaggaccctcgctccagtggtggagggccaggcttgggacagagcccgactttggccagagatccttcctgatgtccccaggctagcacaagcctccaaggcagctgggtcttaggtcctctgtagccctagttctctagtcagttacttctgctcaagcctgtttcatcattggctacgttgtactcacgcctcctccccttcctcctcaaagcaatcttgctgaactgccaggcccattagttatcattcaaatctctttgatcagacctatttgtgcactgataatgaatgggtttgcatctcagtccctccccacagtaaaggcttctgggggaggaaagaactcattcccatttcctggggaagaagccagcaagacataataaggaatttggggttagacacccagcagtattgagaaagtctctgtgtgcaaaacagcaagaactgcagccagcttcttctagaacactgctcctgagaatctcacctttcctatgagggcaagtaggatgcttgggagacaggaccaagatggcgaggatggcaacagttggtggtgagattacccttccaccaacagtctgcaggggctggggagcagctgccacctgcccagcatctgtgctcaccagtttgccacagtccccaccactccctattgtttgacatcctgtctactttattcatttctattacctgacttgctattgcatgagtaatatctctttcttcctttgcattgaggctaagctttttgcattctgatatcattacctctgaaagccagacaggggaggggggcgtccatcagctcaaccaatcaactcaaactgacctaacaagaaaggagtttatagttcaatgaaaagtcaagggtacgtttggcttcaggcatgattgaatccaggtgtttatattattttctcaagaaatcatttgtatctgggctctgccttcctctctgctagcttagatttcaggcaagctcttcacatagaatgacaaggagactgtctacaattccagacgtacaccccacaaactcaggagcaaagggtgcagctcagattttaggggtggtaccttcagttctgattggcctaggacctcagggtggggcaagcaccacccaaaccccatagactgagagtggttgcctaccctcagggaaacagcagttctattatagcaaaaaaaaggagggaaacactggtttattgttagcaaatgttcactttcttcctccttcccccaccccctattgaaggagtacattctctgccccattgatgctgggcttggccttgtgattcgttttggtcaatggaatgtggaagaaagcaagagtgtgcaattctgagcctaggccttaagaggattgcagatttccacttgttcttctgataacttctgactttacccataagaataacatactcctgggtagctgctgccctttcatcctgaaccccagaaaaacacatggagaaaagctgttttcccgtatacctttgaggtatagtgtattagtttgaggatgagtgtattagtttgttctcacgctgctaatgaagacatacctgggactgagtaatttataaagaaaggaggtttaattgactcacagttccacatggttgaggagacctcataatcatggcggaaagtgaaggggaagcaagacacatcttacatggcagcaggcaagagagagtttgtgcaggggaactcccatttataagaccatcagatctcgtgagacttattcactaccatgagaacggtatggaggaaactgcccccacgattcaatgatctccacctggccctgcccttggcacatggggattagtacaattcaaggtaagatttgggtggggacacagccaaaccatatcaatgagtataaatgcttattgtatgccactgagttctgggatggtctcttacatagcaaaagctgacagacacaaggtgaaggcttgtgagattcaggaaaactgtggtagcaatgagcatgagtgaaactggagtaagaaccctgagatatgatcaggtcaaatgtggtttgaccctgataggattttgtacttaatagtttgcatcttaggcaggctgcttaacctctgtgcttcctctgtagtctcctcctgtgatgaatgggtatgatcatccctgccctgcagggctacggtgagaatgaccagatgttgtgcctaaagtgcttgagatatagtagcttctcaataccttgattttgtgaggtttttttgctatgtgttgccaaagtgttaagctttgagaatggctctgtgaatcacttgtcaccagaaaccacttaagaataagctttagatgtaaagagagtgggctctggagtgaggccgtcttgctgtcatgccagctgcaccacttgctggctggtgacttcgggccagtcccttcatctttgcatgctgatgtgtgtgggtgacagatcctggctcggggctgctggagtggacattccctaagacaggcagtaccaggaaggcagtcagtgcccagtggtggcctatgatcacagctgctgctgttaattatgcaggactctgacatttcctgtcctgtctcatctcatctcgctttccctccatctagtgtttccctgagaaggagccttgggccacctagcacagaattgcttagataggggaaggtggtacttgttaaaattcagactcctgggccctctcactgaccctagagtcagactcttgggaatggatccagaatctgcatttcaccatctccctggtgattgttttgcacagtggcctgggtcatcccctgcccgtggtcctagcactgacccggtttcagcccttgaagggcctctatggcccctccctggcttcctgtagctggtaggtgggctggctgaacttggggatgatgaggcagacagggttgatgggggcggggggagggctttggggtgcctcctgccttctgctgctttctggaactgaacttcagttttcaagatggggaaaggaaagtcagccaggaggtcacttccatgaccgtggacattgtctctcagtgcagttgagtcaggaggacccgatttttcatataggtcagtggttctcagaatttaatgttccactgttggctatattgtcctccttgttccattacttatttatttgatatttttctttaactcacttaaaatatctaagtacgtttctagccctcatttatattacatccatgacttgccataaatctaacaatacacagtgaaaatgcaaccttgcttctacttgagggtggacccgatgtctgccaaggccttgagcctgaatccccttgctctgtgttaaccaggttgtgtggagtgttgcaggggtgttaaaaacctatttgcaccaatgaacacatctcttaacataatcaggaagatgtaaagaggctgaagagcatccctttgtcactgtgattcaaggtacagtcgagtctcattatttgagaatttggggatttatttactcacttaaaatttatttgtaagccctaaattagtactcacaacactttccagattgtttgcagacatgcacagagcagtgaaaactttgagtcacctgacttgcacgtatctaactggtggaacatggtgatgctttgccttcttgtttcagcctcataatataagcaagtgtccttttcatggtctatttagtgtcagagaaaatgcatgtgttagataagtacatgggtgttagatacatttgtcggaattagtacagagaatctgcatgtctcagatgagcttccttcaggcctgagttgtagagccattcgttgggagctcagtgttaaggaatcaataatatatgttgaataaggcatcttcgatcagaaatactcatcaaataaggctacatgttgattggttggtgaaaatgtgaccagaggctctcaggaacctaaccctgtatttcccctaggagctgttgttcaatatttgctaattcagtgttcacaatgactttataggacgtaactaccatgcataacagaatcaagtgtactccaatgcctatctgtgagacacaccatcctttctttccaggcacaccctgggctcagggcaatgttccctcatacagccccccactttatgtggggggaaggcagacatagaggggaagcgtccagcttaaggtcctcccagagaggtaagggaccaagcctcacctagaactcaggtctgttgctctcttttcccaccccactggacctcacagcaggactgggtgggatggaagtcccaggtgagaggagatggaggctcatcatcatcaatgcccacaccggggtgcatcattagccctccaggttcaaggcagcagtgacaggagcagctgcctgcctttgcacagccccgtgttccttccccatagcctcatagttgcactgttcaccgcagcccttgcccagggaccctgttctctcttttgaatcactattttagttcctcactcagctcttcatagaccaagcaccttgacctgttctctctctcttagaattatagctatcttttttttgtagataataaaagtaatacatgaatattatagtaaatgcaggccatgcacttttataaagaaaataacaatcacaaataacaccaccccaaggcagccggagctacttttcaatgttttctctcagtttgacacatgcacacacaggcacacatacatagaaacaaaattgggaagtaaatttctatcttgttttagctgcataaatttctgtgagcacttttccaagtcattagatatttcttgaaatgtcacttttttttttttggtctaatcatattcatcctgaatgagcatgtaaataaacatttatttctctcattgaccactgaggatttttgggtttaaccatcataaaacaattttaatgacaaaagagtgtttgtaacatggttgtccaatcttttggcttccctgggccacactggaagaagaagaattttcttggaccacacataaaatacaccaacactaatgatacatgatgagctaaaaaagaaaaaaaatcagaaaaaaattccattttttgttgttgttgtttctgtttgttttttgagatggagtctcgctctgtcaccaggctggagtgcagtggtgtgatctcagctcactgcaacctccaattccctggttcaagtgattctcttgcctcagcctcccaagtagctgggattacaggcatgtaccaccacgcccagctaatttttgtatctttagtagagatggggtttcaccatattggccaggctggtcccaaactcctgacctcatgattcgcccgccttggcctcccaaagtgctgggattatagacatgagccaccgcgcccggccataatgttttaagaaagtttacgaatttgtgtcgggccacattcaaagccatcatcaaccacatgtggcctgcaggctgtgggttggacaagcttggtttataacatttggtattttaaaaaataggatacccatgatcaattatcttctcagcacgtgggaacttgtggcatcagacattgattactctcactttttcgggtgaagaaaccaagaacccagagaggttcagggactcacccagagacaccgagcaggtgaggatggcctgcactttacagaccggataacagtccccctttcaaaggcagcaggcctccaatttggggcactttcttcaaaccacagccacgaactctattcactttgaatttcattttctgccaacagaaagtccttggagtagttgctttcctccatacacttctacagtgttgggaaccttccagaaggtccacctgggtggtcagaaaagtgtacaggtttccttggatgtccatgagggccccagggggctctactccagggctctgcagactacaccccaagtgccaaatccagcctcccatttgcttttgtactctccgaaagctaagaatggttttcacatttttatgtggttgaaaaaaaataatcagacaattgcgattgatttcagtgatagagaacactaactctgacccccaattaagcaagtattatcctccccctaaattccattcctctaattagtaaacctatattactttttcaaagaccacacttagttattactattatattttgaatttcatcaataaaaaaatgtgtggaaatttggtttttatcttgtaactacttgtataatattttcaattttgcctcttggctcacagagcctgaaatattcactgtctggccctttgcaggaaaagtttgccagcccttggtctacactggtgaaaggtcctgtggatgactcggttccctctcatgttggggagtctgataaccaggcctcaagctcagaatcgcaactaccttctggccccagcaggattcatttcattacactcttttctttgacacctttagcaattataaaccaaaaacaggctgcatgcagtggctcacacctgtaatcccagtactttgggaggccaaagcaggaggatcacttgagcccaggagttcaagaccatcctgggcaacacagggagacccctgtctctacagatgagttttctataaaatagccagtacctgcctgtagtctcagctactggggaggctgagtcaggaagactgtttgagcccaggaggccgaggctgcagtgagctttgatcaagccactgcactccagcctgggcaacagagtgagaccctgtcccctaaaacaaaacccatcaataggaaacagaagttacaaggaccaaatcaggatcttggtttagaacatgaagtctccaaaactggagtgatgagacattgcagagacatcctcatcacccactacctcaacccattgccctcctgctcaaatctggtcccccctcgaggtatccactgcacagcatattccttcctaacatcagcctatgctgtgggattcatcttttcctcctttccattagcctttccttttccctggggtctggagtttcccaggacaaaagtaatagagctcaaagctggaaggagatggaggaaagacttctgttggcatagtaaggtgctatctcccttgctcacaactgatcaacctgtcaccctctgtaagtatattagtccattctcacactgctgtaaagaactgccagagactgggtaatttataaaggaaagaggtttaagtgacacaaagttccacaaggctggggaggcctcaggaaacacaatcatggcggaaggtgaaggggaagcaaggaccttcttcacatggcggcaggagggagaagtgcaagcaagggaaatgacagacacttataaaaccatcagatctcatggggactcactcactaccatgagaacaagatggaggaaactgcccccatgatccagtcacctcctaccaggtcctgctctcaacatgtggggattatggggatgacatttctagatgagatttgggtggggccacagagccaagccttagcagtgagatatcagctcttcttagattcctccatcctcaatcctgatcatcatgggcttttccttcttttctcttctccaccttcaaaattcaaggctcccccattccatcccctaggctaggctagaacagaaagcagagatccaacagcaacccacaatgcgagccagaaaaaggggggttgaaacccaggggaagggcagagggaaagcattcaaaccactgaggaggaaaagtgacaccaggaagagggtccagggtgtagccctgagggctccaaagactctagaagccaagtcctgtgccagcccatggagcccccgaaggggaagcagctccgaaatccccatctccctcatggactcagtaagcttggattctgttttgtggatctgtggcaaagaaacaacagaatattgttagaatattgtttgaagagcatcatcgacggagcacaattcccctccacccacccacccaccccacctccaatcagcagcaagtgctggaggagaccagtagacccaaatatctgtctgtccaagtgggtggtgtgtgcctgttctgtgcagggacatcaccacctctgccgcttaggatcaaggacatggagcctggatagcataggcctaaacaacagctatttataaacatgtcacacagagtttacaaaacacacacacacacaaattatgtcatcacattatcctaaattctcctaaaacttgcatctctcacttgagtcttgcaaagagagtgacattgttcatttcatgactttatacttttctgattcctttaggtatcataacttatttaacccaaccccctattgatggatgttaggttgtttctgtgtgtaaatgtgtgtgtgcgtgtaacacatattgcacatgatgttacatgaacatccttgaacataaatcttcacttacttgggcctttatttctatagatttcctaatagtgaaatttgggggataaagttgtcttcatttaaatggattctgtcaaatcactctcaaaaatggctgtaccattttgtacttccaccagtggagtatctgggttgtcatttcacagttccaaaacaaacatggaatatgctccatctttgacgttttagccaatttgttagattttcttggagactggtaactcaatgtcagaatttgcatttttgaatgatgagtgtgccttgactttttacatatttttagctatgtgagtttcttctctaattgcccatttgtagacttgtttcatttttcttctgagctgatggaaatttttctctgatttgcaggtggagcaggagcctggctggttcctcctgctccagccctgggcttggggccccactcacctgcctcactcaactcatctctcccttcctctttcttccaaccctggcccaaggaatcctttctctcctaggctgcaggggacccatccttcctcacttatcagcgtgctcccaaatgcagtgactataactgaaaggccttcctttttccaaaaatgatggctatttgaaactcaaaaggcagtgattgagtctttaatacgttaaacacagagatatcataagacccagaaattctcctcctgggtatatacccaaaagaattgaaagcaagtgttcaagcagaatcttgtatgtgataattcatagcagcattccttataagaggcaaaagataggaatagcctatcatccttcaactgatgaatggattgcaaagtccggtttctccataaaacagaatattattcatccacaagaaggaatgaaatactgatacacgctacaacgtgaatgaacttgaagtcactatgttaagtgaaagaaatcagtcccaaaggacactgagtctatggttccgtttatatacaatgtccacaataggcaaatctagagagacagaaagtagattagtggtggccagaggctggggtgagggggaatgaggagttacatttagtggtatcatcctttgggggagataaaaatgttttggaactagatagtgataaaggctgcacaacactgtgaatgccgtaaatgtcgctaatggtagattttatgttatatgtgttttaccacaataaaaacaaagtaaaatagataattgcttaaaaaaaaagccatagattgattcctttcccatttttcctgttttctactctgtggtttattcttggaggccctgaatctagaaaaaaaactcagctgtccaaaagtgagacaaatcactactttaaaaaatattgccaggtgcagtggctgacgcctgtaatcctaaactttgggatgtcaaagtgggaggagtgcttgagcccaggagttcaagatcaggctgggcaacacagtgagaccctatctctatgaaaaatacaaaaattagctgggcatgctggtatgcacctttaatcccagctactcggaaggctgaggtgggaggttgcagtgagctgagatcacgccactgcactcccgcctgggtgacaaagctagaccttgacacacacacgcacacgcacacgcacgcacgcacgcacacacacacataaactgccccaccagagttgcctggcctttgcctgctactggcagaaaccttcctgaaagaagagcactgaagcctgttcatagctccctgggtggccgcagtgcccagatgatttcccaaaaggtaacaggctcgggtgttggtgcccacaagagacattgcagctatccctccatgtgctgctgaagtggatttcatgagcttgaggactgatgggctgcagttgggtttatgttgagcatcctcaaactggtccctcccctgagtctttgggagaaaagattctggtcgagttgccgggccctcgtcctggagaagggaggtggaggggtatggggaactgtcttgtgcgaggtggttttgagtcagcggccctgtgtgcgggtggccatctgctgggtttctaaggggcatctcacttctcccagcctcagcttcctcgtctgtaaaatgggggcatgaagatcaaataaatctgtaaaatgggtaatcctgaagattaaataaggcaatgagcatatatccattcatgcagagtgcgacacacggcgagctctcagtacacatctgtgatgtatttggggggccggagcccttcctgaaggaggtggtgcatctgcagctggccctgtcccccagcgaacagatgagcagctggattctcagacatgtctaagaactgggggatcctgacatcagccacgtgaattaggattccacatgcaaaggcagggagacaagagaaggcacagcttatgggaggaatgaaaaaggctcacatggctgaggcataggttctgggttggaaagtggtgagggaggaagctggggactctgcaggggcgggtcataggggcctgacacctcaggaggagcagggatgggcgaggcacagtcggttcattctacaacaatcatgtcagagacctctcttatgaaatgctcttcagatcactcaggttgagggtactcttgacttcctgcagggactgtgacccgtgtggcctctctgtgccaagcatggccaacgagcccagggctgtgcagatggcaccccgtgtcaatttcctgtttctccatgccggtcattcttgtgccgctttcattgtgtttgccatcatgccttctgtttgctaattatgcgttttaaatcaatttacttttagaagaaacacttatagagaaatccttcacttgggctaattatattttctaatacattattatacacacaaatgaaatagaaggcattcgttgttgttctccccgaaatcatctccttttatattttctaatacattattatacacacaaatgaaatagaaggcattggttgttgttctccccgaaatcatctcctttcgggagcacacaagctaccctttggaaaacactttattatgtaataaacagtcactgtgacaaccctacattgcacactaagctgagggcagggagggcatgcctggcccaaggccacacacacagctagtaatgggtagcgctggatttgggtcctgactccagagccctggtgatgttgttggggtagggggtgcctggatgctaaatgccccacagtgtgttggacagcgttgcccaaaaaagaactgccctggccccaatgtcaggcattctgtggctaggtgggggtttgctaggggctgaacatcaccaagccaaggagcatttgcaaataagcccactgttaggggctgaattatttccttgcccccaaatttatatgttgaagtcctaagtcccagtaccttagaaggtgactgtatttggagatatggcttttaaagaggtaattaaggttaaatgaggtcattggggtagacccaaatccaatgattggtctgcttagcagaagagattaggactcagatatgcacagaggcaagaccatgtgaggacaggcagaaggtggccacctgcaagccaagaagagaggcctcagaaaagcaaccctgggagggtgcggtggctcacacctgtaatctcagcactttgggaggccggggggcgcggggggtggatcacctgaggtcaggagttcaagaccagcctggccaacatggtaaaaccccatctctactgaaaaaaaaaataataataaataaattagccaggcacggtggcgcacacttgtaatcccgcctacttgggaggctgtggcaggagaattgcttgaaccgggaggcggaggttgcagtgagcagagattgcatcactgtcctccagcctgggtgacagagagagactccatctcaaataaataaataaataaataaataacaattaaaaaagaaaaaagcagccctgccgactccttgctcttgaacttctagcttctagaactgtaagataataagttctttttgtttaagccacatattctgtggtactttgttgtgacatccctagccgactaatatgtccccttctgtctggacaggaaacctctgtcgtgggcacagccaggccctctggaactatgcccagccccgcacaagctggaggtgtgtgccggttttgagggctctggcctttggtccttaaatgctctttgaaaacagaaacactgggattaatttaggaaagaggaaactggttctagtgattttttttccataaaaaaaaaaaaaaacaaaaaaacacgtgactaagagcacttataaaacacagacagcctctccctcccctagagcaaactgttatgtgtggggatagcgcccagcaccagggcggagagagatcttggttagtattcctaggatggctgcctggcagtctttattgccttctttatagaggctttgcatctgcagcctcttgggggatgcaggtgctgagataacctggcttcacctgcattggatgagtcagggaggaagcctggcatgcagttcgtccctgaagtaaccgatgggacgagagagaaagctctggttccactgctcacaggccacaagcaggtcacagtccccccagtgacagatcacgcagggaactgacactactcagagtgcgctggaggttgtgcatcctacagccaggaaggcaaggacactggtctttattctaccttgtccctttcttgctatgtgacctttggcatgtggcttcctcttgccaaattgcagtttctgcatttgtataatgccagggttggaataagattgatcttgaaggtcctagccagctctaatgttctgtgatgttttcctgtgatggcaaacatcaccatttgggcaagtaatttacctctccaagccccagcttcttctgtaaaacgggcttaataaaagatcctgcattatagggctattgaaagaattcagtattttgcatatgtgtatcagagtgccaggaatatattaatacatgtgcagaaagtatttgctattatttgtatttatggttattgttctttgagatttattcattccacaaatatttattgtgtgtctactatataccaaacgtttctacaagctctgggtacctctcattgattttacattcccaaaggagggtaccagatgataaaccgataaattaatatataatgtaatttcacataatagtaaggactttgtggggaagtaaaggaaggttgaggaacagggtggcaggggtgtggctgttgagatagggtggtagctacacagatggctggaagcagtgaaagagggagcctttcagcttcctggggggagaatattctaggtcatgagttgacaaactaagggccacaggccaaatctgccctaccacctgtttttataaataaagttttattggaacacaaccacagtcatgcactttcattatgcatcattatcttttttttttttttttttttttttttgaggggtgacagagtcttgctttactgcctaggctgaagtgcagtggcgcaatctcttctcactgcaacctctgcctcccaggtacaagtgattctcctgcctcagcctccagagtagctgggattacaggcgccagccaccacacctggctaatttttgtatttttagtagagatggggtttcaccatgttgtccaggttggtctcaaactcctgacctcaggtgatctgcccatcttggcctcccaaagtgcttggattacaggcgtgaaccaccacaccctgccattatgcattatcttatctatggctgctttcctattacgagagcagaattaagtagtttcaacagaccataaggccaacaaagcctaaagtatatgctctctggtcctttgtaggaaaagtctgctgacttctactctacataaagcaaaccacaagtgcaaaggccttaaggctgtgtgtgtcaggtgagccaatgggcatcacacaagtgcttattctgtgtggctctccgggccccttgtgaggtcagttgtgtgtggcttgccagccaattaagatgagaagatccctctaggacagaagtgatgctacaggctgtaagagttaaagaggaaagaaacatgaaacatagcttggcagttaaagacaggtttactttagataaaacctgagaggggcttctggccgatttcagtcaggagcactttctcttacaggctaagagtatatattggttttagggtgaggggcttattacaagcttggaatgtttttgtgtgagagaagttttatggtggggttggaatgtctctgggaggaggagaggttatcttggggcagatatctttccagccagagggggatatctcaaggctgggatcttcccagttggagggggcttatcttggggctagcatgtctctggtcggggaagagtttggaatgtttctggttggagatgttatttgtggtttacggtcatgctgaccttagccatcaggctgatgccctttggatttaggcgattttttttattaaggtgatctttagaatgagggacttgtccaagatggtaatgctcctgctctgtcacaggcctcttctggaacacaagctaatggaataggggatataaagcaggaagtggctatgtgaaacggctgtgttttcgagctattttaaagcactcaacagttagctcattcattatggtcattgaattattatcttggcctcacagggagctcagcaggggccatggaggagccttgcttgtcttgtagtctgaagagctcccccttattctcaagagaactcctactctatatcctactctatatctctatgtatcaagcccccaaatcatggaactcttctttctcatcgaaatgctgtttaggaagtcagacacctagatgcctcatgtcccaattctatcattcaggcatccaagaaaaatccattaaggagtggacatctgccagaaccaacatcaaggcacctaaatatataaagcagatattaacggaacagaagggagagactgacgacaatataagtcactcaacctctctgagacaaagcttccgggtcttaaagtggagataataatgctacttgtgtttttgtaaggattgaatgatataaagcagagataggtagactccagcttgcagaccaaatctatccagctactagtttttcttaaagcccatgagctaagaatgttttcttccttctcattttgaaatggttacattttaaatggttatataagtacctacataatagcctcatttttgcctctggcctggaaagccttgattctttactacctggccctttaagaaaaagtgtattaaccctgatataaagcacgtgggcatagaaaaagggctcaatccatattaactagtgctgtttcaattctgaaggaattaagttatcctcaatgccttaacatgtagtcctcaagaaggtcaagcatacttttaaagtagatgttaattactaataattggatgggattcaccatgtcctgagcactggcccatctcctgtatatagagcaattcatttaatcctcaaaaccaccccaagaggtaagtactatccccatttgaaaaaagagggaacagagacacagagaggctcagtatcttcctaaggtaccatagctagtgagttatgagctagcattcaaatctaggctggatttctccagactctgctattaactcctagactctgctgcacttgacatagtgtcgagtccccagaggtgttcagtaaacacatgcactagtgtttactaagccacccacctactgaggcctagtgtctagcccccagagggtgctcagtaaacaccaagtaaacacttggtttgtagggacatggatgaaactggaaaccatcattctcagcaaactatcgcaaggacaaaaaaccaaacactgcatgttctcactcataggtgggaattgaacaatgagaacacatggacacaggaaggggaacatcccacaccagggactgttgtggggtggggggagcggggagggatagcattaggagacatacctaatactaaatgacgagttaatgggtgcggcacaccaacatggcacatgtatacgtatgtagcaaacctgcacattgtgcacatgtaccctaaaacttaaagtataataataataaaataaaataaaaaaacaaaaaataaataaaataaaataaaaaaacacttggtgacagcatgcatgtgcagagtctgtgagcacgaagagcaacccagtggactgtggggcttggaagaggagggcaaaggtggtatccatcagagctcaggttcctgggtgtgacagctgggagcatttccacacagccacttgggttcctcctctggtggtcaatgctcctcctgacctcaataaaagtgaacatttattgcattcaagatgtgcctgcattccatacgtaattttaatttcttctgtaggagtgcatcaggtcgttccagttgtaatgtgcacttacagatgaggaaagtgaaacacagagcgtttgagcggcccagtgtcatgcagctcatacacggtcagcgtagctgttctcacacccaggtctgtgcggctgcagggcttggcctctcagccacagtgcagggtggggacattgtaactggctgcttggccttatttgtggacatgctggctaccgtgaacttccagagaccctagtgaacacgttccaaattcacaaaactgcaggatggggcaacgatccacatttcctctgcgagccttctcctttaaaagcacacactttgccacatttcagcacatggctctgcaaacgtttgcagttaataccctctcccagaagccatctggggggcgattcaggttcatctgagagcacacagtgggtggccatcacccgcatccattttgtcgataggtgagggatgctgatgccaaccgcttacctcggtagaagacccctccccaggagagaagtcttaatgccaggaatgatgtccaaacgtaaggtgaatgggtgacttctggggcaaggggggacggtgtgctgttgccaagaggggaacagctgggaaggagagacgagagctcaccctgcagcagccatagcagaatcggttcattgtggggcttggctttagttaatttctctgtcccattaccttgctcaggagtttcatggttgcaaagaacctactcaaaagaggaaaatatgttaccttatgcaaagaagaaaatatgttcattcatttagtaaacatacttacctatgtactctgggccacacactgtgccctctgaaaatttactgggaataaacaaggtaattgcagatgacagggtttttctcgggcccctttgcttggcttgcagcaggaggtgctccatctacttggcccaccaggctgtgtctggcttgcactccgtggatcccatggccaccacaactgcatgcttagcccctggtgggaaggggtgtgtgagcaagcaagtgtggggtccagccagctgttccaaaagctggcacaggggtaggctccctgctgggcttgtggctggaccaggcatgtcaccccaagggggaatgtggtggcacccagccaggggtgcccacaaccccaaagccccagaaggggttttaaatgtgctaattaactcgttcagtactcccgtccacagtccaacggacagcggtgtgttaacagcttggtcagccccttgccccgctccagcccacagctccgggggaagctctggtcccattactgcttcctgtcacatggggtggctgccctctgccagcagagggctgagagccacagtgttacagccctctgagtacccacatttggtgggtcccaagttcttgtcccacatccaagaagaatgaggtcatgctgacaattgaaaggtgatgagggcagagaattttattgagtgataaaacaactctcagtggagaggggatgggcaagtagtctctcaccctaagtcaggtcatctctctcagtgtggttgagtctggggtttttataggcacaggatgggggaggggcgggccatagatactattgaaaaaggccacgtttgattggttaaaaagcattcagaaagaatcaggaaaggatgggcaaacaggaacagaaattctcactcttctgtcctgagtcatgggtttcatctggaaccagcagtccggtctttcagccttcaggctgttttggcttgaaggtggtgtttcaccagggacccacccctgtctgcctcctgccactgtcacagatagcacaaggtgctgtgaagagttcgaaacacagtaatgcacaacagaggaggcatgaaacaggaggaggtcaagggaagcgcctctggggaggtaacagctgagctgtgtgaatgatggagccaccctgtttgaaaatttgggtgaagactttccagacagagggaatagcagggaatagcaagtacaagtgctctgaggcaggactttgcatggtgcagcagcagaagagaaggctgcggcagcaggaggaagttagcaagcaggagatttgggagaccaggcaggggcaggccttgaggccaccatctggattttctcctgagagccacagacagcctttggaggggcaaagcagcccgtgcatgttagggtatccccaggagggacaggaggcctgggtgggtcaggctgtctttctgctccccagcttgtctttctgtgcctttggcttgtgttgacaaaaagagtcgaactctgtaaaatatttgaggaggtttattctgagccaaatatgagtgaccatagcctgtcacacagcaccaggagatcctgagaatatgtgccgggttacagcttcattttatacattttagggagacataagacatcagtcaatacatgtctgaactccaaatatatgagacaggtctcaatcaacttagaaagttaattttgccaagactgaggatgtgcctgtgacatagcctcagggggtcctgacgtgtggccaaggtgctcggggcaatttagttttatacattttagggagacatgagacatcgatcagtgtgtgtaagatgtacgttgattcagtctggaaacgtgggacaactcaaagcagagaggggcttccaggtcataagtagataagagacaaacagttgcattcttttgagtttctgattagcctttccaaagaaagccatcagatatgcatttatctcagtgagcacagagagatgactttgagttctgtctgtcctttgtctgcaaggaatttcctcgtggacaaattgtgagggaggtatgtagcttttttaccctagtagccatagaatagaacgggaggcaggtgtgccctaagcagttcccagcttgacttttccctttgtcttagttattttggggtcccgaggttgacatatattatacatcttacatgtgctagaggaaaatgtcccctctggaaaggcagagataacacaaaggtgggggttgggggcaggaacagcagggaggggagcttccaggtcataggtgaattcaaagagttcctgaattcctgattggtgactggttgaaagagtttatctaaagacctggaatcaatacaagggagtgtctgggttaaggagttgtggagaccaaggttcttattattatgcagatgaagcctccaggtagagagaatagattgtaaatgtgtcttatcaggcttagaaaggtgccagacttagttaattctctcctggatcaggaaaaaaggcctggaaagggaagaggattctctacagaatgtagatttttacccacaagtgacagctttgcaaggccatttcaaaatatgtcaaagaaacatattttggggtaaaatacttcaatttcgttcagagcctgctatctgtcacgttggcatcttattggtagagtcggctttgtcagtgttaaggtctctgttttaatgttcatgctggtcagccgtgcctgaattccaaagggcggaggtataatgaggcctgtttgacccgcattcccatcatggcctgaactcgtgtttcaggttaactttaggatacccttggccaagaggaggggaccattcagttagctgggggcttagaattttgttttcggtttatatttgtcaccttccagtctcaggatggccaccacagctgctgcatttgaagcaggagcatggggctggaggcacatgtgctgcacccacagaacagacaagaaattacagccttttccggaaaccccagagagctcccgcatccacgccactggccgtgcggacacccagctgtggggaggccaagggatcaagcacccagcaagggacatggccttgccagtcctaacatatctcacagcggggcatgtggacctgctgcaaggaattggggcgctaagggcaagacaaagtgaggaccagcccttgaggctggcagagaagaaacctcaggccacggtgctcaggcataaattagagccctgtcccaagtgcacagagaacagctgcgagcagggcccgtctcaccctaccccaccccacctccagctgtggtggggagagaaggttctgggttaggctccaaggtctagggagcccacgtcgtctgcccctgcctgagtggaaggctgggcgcaggtgggcctcggcgttaggaaaggcaactgctccctcttgtggccactctagggcagcccggcgtcctcccagcgatgtggcagccggtctcaagcaggcaggggtgatccctcctccccagccctgcgcaggcctcgaaggggaagagaaccagcgatgctggtgagagctaaccttgattgggcacctctggtataccaggcgcccttctgtgcacttcgcaaatattaattcaatcctcttaactcggccaggttggtcccattcatgtgtccgttttaatgattgggccatttgcccaatatcatccgggcagagattgaagctaagtccacctcatagcaaggctgtgcttccagctcctgaatttgggagctgtagaatgtgtgcttaaagactacgcctgggggacaattgcatcgatcaggaattatatttctttactgtttttaatttgtgtatttaaaaaggctccaccaaaatttcttttttctttctttctttctttttttttttttttttttttgagacagagtcttgctctgttgcccaggctgcactgcagtgacacgatctcggctcactgcaacctccgcctcccgggcccaagcaattctcctgcctcggtctcctgagtagctgggactaccagcactcgccaccacgcccagctaatttttgcatttttagtagagacggggtttcaccatgttggccaggctggtctcgatctcttgacctcgtgatctgcctgccttggcctcccaaagtgctgggattacaggtgtgagccaccatgcccagccccaaaatttcttcatgtggggacttaaggagtccgtggatgtagtttagacatccctgaaattggaaacaaaatgctgcattcatgtctgtacatttccttgggtaaaggcctagagcagctgtcagagggcaaaggtatgggaaccccaagaaggtgaagagccccactgcccattttaatgtcattattgtgtttattctctcatagactctcagagagagccggatggaattgattagaaagtgcttgtcacaaaagcctgtctgagccctaattgacttgtgacgagcttacattttgcataaatcagcttttgtttagctcttgggtttgacacctaatgagagtctctcagaggctgaggaaagccaaagccatcccatatttttaaaaaagtttaaggcaaaaagggatgtcagaattgtggtaaaatataagtgtttatgtttaacaaagtaatgctttttgcataagattcaatgatgatacatctaagtttgtttatagataatgtcaaaagtctaaactggaggattctgtgaataaatggcccgggccaaattatccttctgccataaaaggtgccaggtagctggatgatgtcaacccaggtgttggcttcagagatgacaaaacaccccaccccctttctaattcccagagaagcagacagagcccaggtcaccccttccctcgccaccccgccccaacccccaccagaagcaggtgcctcagggtagtggggaagtacccaaggcaggggccaggtccaggggagggaagaaggagcataagataacctcccttgcacctccccaggtttaattcaccttactctggcctcagagtttggtttgaggctaaatccccaggaatccaacccacattcaaagggatacaccaaagctcattccaggaaacagaaaaactgatttcaagtttccagctgtttgggcaatcaaggaaataatcagggctttggatttggtttctgtttctctctttggctgtgtgactttgggttaacctctctgaccttcagattcttcgctacctttctaggtagctgtagcaatcagtgaggttcattctgcctgcactgagcggggctgagtgctggggagctgcctggtgcttgggaagacagaacgttctgttaactctcatacacacacacaaaccactcacaaaggcatgtggggacagagcagactttactgaaggtttggatcagtaaccaaagacatcttacaattgaaagctgcatctccctcatcttcaaaagcctcccggctatgttcaccatctggctccagccccttgtcctattgtccagctcatctttctttcctcccctcctcatcccctctcctctcccatcctctctttgcagtgttccctcttcaaaattcctctttacttctagcaaagagcagttcagcactcttttggtggcctgactcccagggttactgctaacagctgtgcaaatgtaaacccaggttgtaccaattacatcatggtccatagcagggggccacaaattgcaacccaccgccaaatatggcccactgcctgtttttgcaaataaagttttattgcaacacagccacacccattcactcactcattgtatatggcccctgacgctatacaactccagagctgaatagttgtgacagagaccatatggtccatagacttaaaatattgactctctgtccatttataattcaacattttaatgaactgcctggaatctgtgagagactagttagagagactggttaagggtcactgtctgcatttcttccagtaacataaagccgatctagctcctgctaggaccaggctatcagcctggctctggagacagattgatgcccaggaacttctgcctgccctcaagaagcttgagatcaagtcggtgagaacactgtgccatgtttaagtggcacagaaaagggatgaggtcaaccccaggagggctgacccctgcaggcctctgagccagctgggtttggccatgggaggcagaattcggagggcaggagagaggctggggtgtttctccccctctctttctgcctcaagaagcacctctgcagctgcctgggcccagaattgcccagcgtttcacaaaaagctacaaatatggattttgtatgaattcttcctatttgtaaatgttagcattggtgattcaaatattattcaagcttttttagctccatgggcttatggtttgtggcttttgtacagtagtcattgatactgtccccagtttaaaattcctatgagtctgatacaacccctgtggagagcaaaactgtacatacccacatcatatgatacaccagttccacccctacgtatctttactccagacaatctcccattccagcatgctggagccatactcaaggagactcataacagcatctgtgtgtaacagagaaatattaggaaccattaaagtgtccatcaatgggagagtggagaaatgccttgtgacatatttgcagcaaaaacaactacagcttcattgatgtacatggatgtggagttctcattagggaggaggagtcaggctggtgggacaaagggaaagcaaaaagagaaagcagataagctgtaagtctgcctttccaggacacaatgcaggaccatggacctcttgcacaatataactcacagtcttcctgtgcccagctattaccagactcttggctgatagaaaaatgcaagttagctccctgcaaccttggtgttatcagtacagcacgtagccctctccagcccaagaaccagcgtataaaatctccagcaagctttgtccctttgcagtcagctcccctcttgctgacctgcccattgcttccttgcagcgctttctcgagtaaatctgcctttctttacctacagctatcttggtacattcttttcaccacctatatgacaccaaccccagagagtcgcaacccacgacaatggacaaacctcagaacatcattttagaatgagaaaagcatagtatcttacttatataaagttttaagcatgaaagcaaaagtgtctgttgcacagggatatatgtgcatatgttctataaatgtaaaggcaaatatgggaataacaagcattgtatttaggattatgaaacctctgggatgagagagagaagaatggagtgggcaggttattcacagggaccaattttatctgccatgctttgtttcctaaaaaaatcaaccatgggcacatgaggggctccctagggtaacagatgatttcttaatctggaggctggttccaatttgggaaaattcattgagccaatcatttatgatacgtatagttctctgcacatgtgtaatttttcttttttctttttttgagacagattcttgctctgtcacccaggctggagtgcagtggtatgctcatagctcacagcagcctccaactcctgggctcaggtgatcctccctcctcagcctcctgagtagctggaactacaggcccacatcaccatgcctggctattaaaaaaaaaaaactgtctgtagatacaggctttcactatgttgcccaggctggtgttgaacttctggcctcaagcaatcatcttgcctcagtctcccaaagttttggggttacaggcatgagccactgcatgtggcctgacttttcaatacaaatctattgatataatttggatatttgtccctgctccaatctcatgtcaaattgtaatccctaatgctggaggtggggcctggtgggaagtatttgggtcatggaggtggattcctaatagcttggtgctgtctttgcaatagtgagtgtcaatgaagagtgtcaaactctgcgaaatatccgaagagtttatcctgagccaagtatgaaggaccagtggccctatgacacagccccaggaaatcctgagaatatgtgcccgaggtagtcaggatacaaaatgattttatacatttttgggagacatgtcaatcaatgcatgtaagatacatgttggtttcgtctggcaaggcgggacaattggataactggaggaggcggggttccaggtcataggcggagtcgaagactttctgactggcaattggcttaaagagttattatttaaagacctggaatcacagacggaatggttaagataataggttgtagagacccaggttttatcatgcagatgaagcctcccaaagcaggcttcacagagaatagattgtaaatgtttatcagacttcaagtctgttctatctgtcttaagatctctgttttaatgttaatgttggtcaactgtgcttgaattccaaagggagggggaggagggtataaggaggcatgtctgactttcacttcccatgataacccgaactcgtctttccagttaattttagaatgctcttggccaaggggagggtttatcagcaggttgtgcggcttagaattttatttttgctttacatgcgtgatctggtcatttaaaagtgtgtggcacctcctctccctctctctcttcttataaattacctagtctcaggtatttctgtagagcaatgcaagaatgccctaatacatgtgttgtagggggaaaaaaaaaaaagggttcttgtcacatgaccaggaaagattaggcctgcagacactttgaagggtgaggggaaatggaatttattaggcgaaaaggaaaaataaatctcagtaaagcaggagagagtcctgctagaaggcttcccacctcatagtttgaatcccagtttactatccaggaacaggagaggccaggttcctttcccttgcaaacggcacaaacttcttgagactccaccccatcctcccagtgctcaggcaggtcagagattctccaggacctgcagtccgggtttttcagccttcaggccattttaggcttgaaggcggagttttgtggggggacccttggctgtctcctgtctctatgacatgtattaaataacttcagtcataaaacaaatttgaaccaagctgggtagtagatgtcagcctttctggtacacaggttgagcatcccgaatctgaaatctgaaacgcaaaatgctccaaaactcaaaatggtgtgagtgttgatgctgtactcgaaggaagtgctacagtgaacatttcaagtgttcagatttgggatgctcagctgctcagtgtaatacaagtatccccaaatctgaaaaactctgaaatctgaaacacttctggtcccaatcatgttggataaaggatactcaccctgcattatcctctgctctttattgtaggcttaaaatactcaataatgaaatccaatgaatctacaaatgctcggcagtggcctggctgcaaagtgagaccactaaaggtttattgttcacagtgacctggccgcatatctagacagttgctttatgatgggaaatctatagtaaaaacaggcttcagaataagatagatctgctgtcttaagctcttcacgttacctttccgagcctcagtttcttcatctttctaatggggaggataatgccagcctcatggctcaatgatggctgttcacaggccctccaggaaagggagctctagccctttgcaaggagcagaggcctgagaacaaccgtatgtgatggtgttggagaagccagtgtgtgggaagcttctgctaagtcagcagcatcagggatttgcaggatggcctgaccaggaagcatgttccttcccccagcacttccttcctgctgatggaattgacatgggctggaatagtggaacacacactcacacatacacacacgtatgcaaacagcatcctgctggttttgatggatgcgatgcattgattgaaatacgatgattcatcagcatgagggtggaggttcgttctctgagcttgtcaggaggaaaagtgacagggcctacaagcaagtgctggagtactggttctcaaccaggggtaatttttttcccccagcagtcatttggcaaactctggagatatgtttgatggttagaattcaggagatgctactggcatctagtgggtagagcccagggatgcagctgaacaatctacaatgcaccggacaggccctctagcaaaaaattatctggtccaaaatgtcaatagcgccaaggtggaggccctttagaggggacctaggggagagaaacctcttggaggagctgacatcccatccaggacatgcaaacggcccatcagggattagaagtatcttctaaagggcagcttctccggagctctgtctgcagagaacacctgcccaatccactcttatgagtggcctgccatatgtgggagcctgggggcaagagatggctctttcagcctgaattggtcaccaagagctcaggagctggtgttcaagggcaatccaggaccctaacaggggcatatgtgggcacgctccagccttggcgtcctcacccatttgattactaattttgcaaatgtgagtttggcccgcgctggagccatagcttacccttcaggttcatttaacattatcatgtgtacagccccacaggctgtccccattcccaggtgggcttggctgggttctctgtgcagggtctcaccaggctgatgtgaatgtattggccgggctgcactcacatctggaaactcaggggaagaattcacttccaagttcatacgggttgttggcagagtccggttcttggtggttttaggactgaggtccctgtgtctttgctggttggctgccgggggccacactctgctcccaggggcctcgcgtagctgcacagccggcaaatatgcaccgagtccatccatgctttggatctctctggcttcctcttccgccattagccagagacagttttctgcttttcacggctgtgtgatagatcagggtcatccagaaaatttccctccctgtcttaaggtcagctgtgccgcatagcacgatcgtgggactgttgcatccgactcacagatgcagcttctggggttaagggagaacatcttttggcaccatttttagaatcctgcctattgcagtggcttcaaagtcctaaagaatagtcagatctgtgccaacagccccatcaacaccatggcttacttcagcaacagcttacttgccactgcagcagatgacaggggtgcttttgggcccagctggagggatgtcatctgcctggagccaggttctaggactctgttccctgcttttcttgggctctgccttcgaggccatagttctagaaccaccttcctataactctccaatacagcagccctctgggcatttggcccaggatttctgtgttgactctgttgcagcttcttgtccaaaagggctcatgtccaacaagtgcaagcttccccttgggtggtgacaccttcccatctctgcgactggcgtatatgacctattggcatgaccccggctgccatttatgcttcacacatgtgtaggaagggctttgggagtggtctttcctgagtggagatggctctgtctccgcacatgactatcagcatggaagtcagtaggatggagagtgatgggtctggagtggctactgttcccacaggaattaagcagtgaccatagcaatgtctcagtagagggtaatgaataacatcagtagatggtggccatgttttaccttctcaaatcagtcacaatagtctcaattcagtgcattatttatgggcacccactactagcacagcctacaggtttcatcaggcatgccaactcctgttgatgttggcagcttacccagatgcttttaccaagataaattgtgaggctgcatttggctgattggaaaaaatgctgtgattgattagtgatgtctgccatggccagggaggggataaataggcaagtgagacaggtttgtccatgagcctaggcctactgaggatgaagaggtaaatgagaaggctgcattttagtggttcagagcatagagtttaaaatcagaaaggctgggattctgcagccagctctgctctgtatgtggatgagttacctaactttgctgtgcctcagtcttcttatctgtgaaatatggacactaataattgtgagcactaaatgagaatgtaaataaagcactcattctagaccgttcatgattgcataaggatccctcagaggggccaggcatggtggctcacacctgtaatcctagcactttgggaggccgaggcaggtggatcacttgaggtcaggagttcaaaaccagcctggccaacatggtaaaaccctgtctttactaaaaatacaaaaaaaaaaaaattagccaggcatggtggcaggcacctgtaatcctagctactcagaggctgaggcaggagaatggtttgaacctgggaggcagaggttccagtgagccaagatcacgccactgcaccccagcctgggtgacagagcgagactccatctcaataaataaatacataaataaggatctctcagaggttgacagtcttctgagggagacagatatgcagataaacacatgtaataagcattagaattgcaggattgggtatggagagtgaggcacaagtaggaagtgctcactctcctgaggtggacattgtctgcaagggactatatcagctgggtatggaaggatggggaggggcttgctaggtagaaaagaaaggaagggactttccaagacagggaggtgggcaggcaaaggtcacagggctaggaagtcaatgacaagttcagacaagcattgggcatggcagaggaaggagggagctgaggggacagcaggaagcaaatctgtgcataagatgggccatgctgttgaggactgcatgagctgcactaagggatttggccctaactgggtgtgtgtgtgttagaacacggtttggctgccataagggcgaatcctcaaagcagaagggtgtggacaaggcaggaaagttcttttctcttatggacattcccccactggtgtagcagctctgctgtgtgaggtcttaagggctctgcctccttcttccttgttctgcatgttagttatccatcactgcttcacaaattactgcacttggtgggttagcgcagcagccacatttatcatctcacaatttctgtgggttgggaatccagtgtgatgaggctgggtcctcagcttcacggtctcccataggctgcagttgaggtgttggccttggttgccatcttgtctcaaggcttgattggggagagctctgcttccaggctctcccaggcagaatgcagtttcttgtagggcattgactgggggctgttggcagcccttagttcctttcaacctgggcctttccagcatggtggcttacttcgtcaaagcatgcaagccaagaaggcgacagagagaaagagagagagggagagagaccgacctagcaagagaatgcaaccacgacagaagccagtctcttgaataatcttgtgagtgacgttccattccatttgccacattctactcattagaagcaggtccctaggtccagccacactccggggctgggagttacataccatgtgaatacaaggagggggaaatcactgaggacagtttccaaaactgccttccacactctaccaccccttgagtaatgtccttgtccacctgaggcaaaatgtctcagtcacatgcaccttccagcccatggggatggggagaaatcagaaagggggtacccctcgcttttagcccaagacacagaaatggcaagcagcacttctgttcaccttgcatcggcctgagcttggtcagtgtctcctcttgcccgggagctgggcagttacagtctttagctgagccaccaggggcctggctcagagtcaggggttgtatttccaggagaggagaggagaggagaggagagaatggacaccggagaaaagcggccatctctgcaactccagggcctgccaatgggtgttgggggcaggacataatttctttcttgtataaagtagaaaaattccttcctttcctccacaaatagtcattgagcatcttctgcgggtcacacatgtgccagacactatgcagattggcaaaaggaagggaagggaacggaggggaaaagaaacgaagaaactcaggcctgcccaggtgtgtgtgcagagcttgcagcctagctggggacagatagcaaataaccccacacctaaacgaacatgtaattacaacgcgtcaagtgttaggaaggaagcagattcgcagacggcggctttgtttttaattctcttgctaggcccctctgtctttctttctcccttcctgtctctctctccacctgtaacggggtctgtcctagtcagggaatgaaaggcggctttgctggtagatgtcatttccgaggacggcctcaggggtggcgtccctcccacgcactcttcccgtgtgatgtacgtgcgcttcctgctgagaagtgggttctgtgtcccttatcctagaataacgcccagtcttattgactcacttctaatgcctagtacgtggcagaagtgaggctgtgtgactaccaaggcaggtgccatagcttccgcctgctttgttgcctctctggggacaatcacccttggatcccagccaccgtgctgtgaggaaacccacaacagcgccccctggaggagaacagcggccccagccaagagccagcatcaacagccaggcccctctgaatgcacgcaccttcagtcagctccagcccaggcctcacgtccttcagctgaggcccgcgacatcccggagcagagacaagctatgcccactgaatcctgcccaaagtcccggcccactgggtcgctaagcagaagaaacccttgtttcacgctgctggtatttggggtaatgtgttacacagccacggtcacaagcacagcctctatgagggagtggcacttcagctgcgccttcaaaaatgacttggcatcagccaggcaaagagcatgggaggagagaacgttccaggcagagaaaaccgcacaaacaaaggccctggggcaggaacaaactcagtgcatttaaggatgagcaggcaggccccagtgactgaagctcaggacaggggtgggtgctgggggctgagggatgagttgcaatttcccatctgcctaaggtataaggaagaaggaaaggggtatgatctgaactgctttttttttttttttttgagacagagtcttgctctgtcgccaggctggagtgcagtggcgcgatcttggctcactgcaacctccgactcccaggttcaagcgactgaattgctttttttttttctgcaggctgcagagtggaggaatgacggcagaggcgggtgggggagggcacacacgacagctgaatgatgctgctgagagcatgtggccagtggcaggtcagggccatggacaaagaaggaagtgacctggtttgaaacatggaataggggacacattccttagagtgaaggtggtgtttgcaagtaaattctcctgaaatgctgtcatctcacctgggagtgttgaggcctgatgctgttattctctgtatttgttaggggtcttttggatacaggaaaatgaactcaaggttggtgactgtaaaaagggttgcttgaggagtttttgttgttgttgttgttgtttgtttgtttgttttggctgacatatgtggaaagtccgagtctgtggtttgcacccgcttcctcaagccccagtgcttgaggtttggctttgcctacagccccacagaccactctcaggcgggtctttctgcagacctgggctggatgtattggcacttccagggtcagatccaggggaacggaaggcatggctttctgctgacagctctggaaagccccaaggatcttgttggctctgatatactcatgtcccttcccctcctgtggtcagggcaacgtgatcctgtgattggccaactctgggtcacttgctcttcctgggagccgggggggagcccacaccacagggccacatgatctgagagagagaaagagggtggcctcagtgggaaatgggggtactgtaaccagaaaaatagataacgaatgtaggccagacaagaatgacaaatgctcatggcagtcagtaacactttagttagaaacagcatattggcaagcacaggcaagggaggaagtaacttgaggagccaatgggacgaagacctagggttttgaatggggaaaagatacaatctcctcactttgccctgatactttgtagttgcttatattagtccattttcacactgctataaagacatacccgagactgggtaacttatgaaggaaagaggtttaattgactcacagttctgcatggctggagaggccacaggaaacttagaatcatggtggaagacaaaggagaagcaagtactttcttcacaaggcagcaagagagagaagcaagtgcagaggaaactgctacttatatataaaccgtcagatcttgtgagaaatccttcactatcatgagaacagcatgggggaacccacctccatgatccagtcacctcccaccaggtccctccctgacacatggagattacaactggagatgagatttgggtggggacaaagagccaaaccatgtcatcaccaaagggtttctcaggttttgccttaattcatactcgcagcagtcactggctggggtgagcatcatccctgtctacatgacagatgaggaaacaggggctcagagaggggagcctgttgctgcagatcccgccactgagaaacttgaactcaggcccgagacttgaggtcaaagccatctctgcagacaccatctctcaggcccagagtctccggtgcctggatgttgggagaatgacaaggtgcctgagcacccgggcattagatgaggcagaagcagtttgaagacgctttgagatcagctgatgtacaatactcataactgctatactttactgaacccacttacacatatcacatcattcagtcctcccagaaacccaggtgaaagatagactgttgttatctccattttccagatggaaataaaatgaaggccgattaagaaactggctcagcattacccaaataagatggagtggaagcaggattcgaactcaggtctctgactctatgaccagctgccgacctactgtacaataatgcctgcagttctaaaccaccttgagtcactgtcaccacacttttgggccaattaggacattgaaatccttgctaattcattttgtatcttaggaaatagactttaaggtttcagggtcttatctctgtgtcttagcttttgtgcctatgttgaaagctgtattactttataaaggtttcaaaggactggctgtgctgtgtgtgtgtatgtagaacagaggtgaaatactgtttgctcagaggagtctggagatttttctggcgtttccttgactacgtactctaggatgctagagaatgttctgctagatcattttagcagttatattttactcatttatgaatctttaactttaaactccctccactcagaaatccataaaattggaaattaacctccatttgtggcgagtctgtcaacagctaatccctccccacagccaccacatccttttcactgggtgccagaagtagaggcacccaggccatggtgggcagacagaggggaacctccaaaagatacccgggctctgacatcctcagggattgccctcagatctgggacacaagctgaagtgatgtcacccaatgccacagcatggaactccctccgtggtgtctgtggtcagactggggcccagaagtgtctccctgtcctggtgttcgatgtcctgatgaagtcagatttcttgggctagggatttggttgccaatgattgccttgtgaactggcagatgtaaaataaacatttctagagctagaagcacagggagcctaaatgctagtggtggccccaggaggggcaggagcaagacctgcatggcagcgacctgggacaacttaggttttgcatttgccaaggcctaatgctacacacacacacacacacacggatacacacacatgcacacacacacacacacacacacggatacacacacatgcacacacacacatcatacatgcatacatacacacagacacacatgtatagcatgcacatggagacacacacagagagatacatggatacacacatggacacacgtgcatcatacatgcacacacagagatacacggatacatgtacacggacacacatgcacgtacgcgggcacacacggagacacacatggacagggaggaaagggaaagatgaacagcacgtgactggatcagcctgggtccccagcactgtctgcagtttggacttgagccccgtggggcgccatgtgcagtgcaggtttccacactcacgcagaaagcagatatggccattgcagggtcccctgccagggctggcaatgagtcactttttccacctctgcgacccctccccaagtcagctctctcaagctgctattgttctgagtgaaggcagcatcttcccactgcagagaagcagctcctgcgcccactttaaggggcccagatccttcctctggccaggtgtgaggagggtattaggaccccgccatcccccaaaaagcaatcatgaaaacccagattcccatgaggccttatgtcatgtgagccctgcctaccttcccccgctcccttccttgccgcttcagcctccaaatccctcctggagcttctcagatatcccaggcttcttccaccatccaacccctacacgtttgctcctgctgtgtcctctgccgggaatgctcttctcaagtctctgcccatctgtcacctcctcagggaagccctccaggatcactctgtccaaaatattaatactatccccattattttattctatccttcctaccctgtttctccccccatagcatttgtaactacctggcctgatgctgtatgtttggttatttacctattacttgtctcccacactaaaacatcagttctgtgaggctagggacttttgtctgcctcattcagtattgtatcctcatgcctagaacagggcctggcactgcagatgctcagttaagagagggcaaatgtgtggatgagtgttgaacacacaacacacaattacgggagaaatcaacgtcgtcattcactctgggccggatggtgggatccagattagagcagaaggctgggtgcagacaaaggcctgctcactttgggttggagaattcattcagggaagacttcttgaagagcctgaatcaattgtgttgccttccaagggaggtaacattttgtgaaacttgtccaaagcaggggagaagtgtgaagagggagagccctagaatctagctgcctgggttgacggcccgccttgctccttccttactggctgtgtgagcctggggaagtcacacatcctctctgagtctgttttaacatctgaaaattagctaataatggtaaccacttacagaagactgggggtggatctaattagataataccgcgaaaacattgagcccgtgactggcacacactatgcctgcaatacattttagcttttaaaaacttttgttgtgtgaggtacccacgcataggtaacttggtgtacacctggggcaagtcacttcacctctctggccccgggttgcttcatgtgtaaaatgaggaactcaaattcagttcttcccagctttcacattctatcactgcctgggtccttacgttgtgggttggaagtcagctggagtttttctttaatctagtctttctcccttataccttctcgatttagctcctgggaaaccttgttagctttcgttgaaaacaagaaagacaaatccagttgggtgttaggaaggcaaggctcagagtcaatgtgtgtgtggtgtgactttaggatagaggaatagggaccccatggacttgggccttgtgtctggcggaaggagaggttggaaggtggatgccggttggcagcgcagcagagaactcaggcatgacgtgcccaggtgcgagctgccttgggcaggtctaaagccttgggagcagcaatctcttagcagccctgcagatacccctttctctgctgaaatgctcagtttttcttggtctcaagtgacagaaaccaacctcagactgactccagcgattcaggggccatcctgactcatgaacctaaacagaccttgatgaacctttgtgcctggctgaatcttggggcttaaagaacgtgttcagggatcgcgctttctctttctgcttttcttttcatcaccagtagtttcaggcttgcatcctacagctcagtgaggccctggaaaaagagcatcccttttctcaaacctcctagggttgatttggcccagcttggcttgggtgcgggcagggaacccttggcgcaggcagagctgtggagcgtggtgatgcgtcaggcccgtgttacaggctctgacctggagcttcagagcgcttgtgcaggtgagtgtgtgcaagtgcacacgtgactataagagggtgtgtgagtgtgtgtgtgtgagtgtgcacacacagaaaaacaatgggacaatccttcccaccatcactatttgagctgagaactggggagcaatggtcctctaggagagccgaggggccattcaacatagaggggagatggggaatcctaggtgggtgaatagtgatatggggcccctgttaaaagcatagactctggggccattgcctgggtcagattgtcccttcactagcttatgacctgggtcagggttcttactctctaattgcctccatttccccatctggaaattggggatattagtgcttccatcaaaacaagagtctgtgaggattaagtgagctatgatatgagaaggagcttccagctgactcctagatgccctttctgagcagcagaggtagtcgtggaaatgccagctcctcttggtcaattacattgataaatgtcattccccagatttccctttcagagcagctcggtaggttgtgaatccaggccaggcagaatagaagatggggctcactgatttgcagagagtggtccaggaagtgggagtaggtggagtaggtggggagaggtggacaggcaccctccatagcctcagagagctggatgcatgctccacccctcacatcaaaagccggccagtctctggacctgggaggaagggtcagctatttgttactctccttgacctttgtcaggtaatcccaaatgttcacctgtttaggttagacattttatctttctgagaagtacttctatttatctactactctctgctgcaaaatgtaggcattttaaaggtcaatacatttgtaaagcctgacagtttcccgtgtgtttagtgctgaaatggtctgtggacaggtatattagttactgtggcataacaaatcatccacaaacctcatagcttagaataacaaacagttaaaactatctcacagtatctgtggggcaggaatccaggcacagcttagctgggtcctctccttcagtgtctcttccaaggctgcgatcaaggtcttaaccagggctaggatctcatctgaaggctcaactggtgtcggctccatttccaagttcacacatgtggttgttgggaggattctgtcatgtgtgggctcttcgattcagggcctcagctcctcactggctgttggatggagaactccgtcagttcattgccacaccggctccccgctcgccacagggcagatttcagcatgagctgactattgaccatgtgagccttccaacctggcaggctgcttcctcacagctggcgagggagagggtctgctagcaagatggaagcccaactattctgtaatctaatcacagatgtggcattcccccaatattgaggtatgctgttggtttgatggaaattacccaaggagaagggattacctgagggcatgaatataagaaagtgaagatcacagagaccatctcagaagctgcctgaaccaccagggaagaagctatgaggtgtgaacaaagacccagcgacattggatccaggttatcttctttaggtatctgcacctgtccacgcctctccttgcaataaatcttctttgtttaggaatgaaatggtctttcttagttaatgcgaacaggggacatttcttgagggtggttgtaaaagaactcctgtaacctgaccaaagcacgtctctcaccagaaagacctagctgctggggatggggttgggggagctgcatccgtttgcatgtggagccaggttctctagggaaggaaggaactgagatatccatcattgctccccatgacctgaagttgggaaaagccatcagagtggactctggggctctcacctaacatctactggagaaagacaggaaacccacgtggctggggacggatccagaacaagaaatcatcaagagggtgggagcacctggccaaagcttgagcgccttaatgaggttcacaggggactgcttctaacagggctactggctgagctggaatcttgtcaggccccagcagtcccagcgttgtgttggggagcagtggatcttgagctcagaggacagcctgtgcttaacagtgacccctggtggccatgagacctgatggctttagtgtaggtttctgttgtttggaaataggactgatcctctttggaccatgtaaatcccaggattcttggataatgggagtggtgagaaagtgaggtgctcaagaggaagtattagacttcctgctgctgaaggtgtaaggggctcaatttattcaagaaaatgtgaaagcaatagggaggatgcttcagtggtcccaaaggttatggaataaaccagaagtccataaacttttactaaagggctgcataataaatatgtgaggctttgtgggccatacatccctgtctcagctaatgaacttggctgttgtagcatgaaagcagtatagacaataagtaagagagtgaccatggttgtgttccaatacagctttatttaccaaaacagccagttgtgggtcatagttttctgacctcctggggtaaacagttgaggctagtctttccacctttgtaaaagagaagattttgtgaatgtttctggttctgtgaaatgttctttcttcctttggataaatggaagttcacagacctccatttgttcattgctgtttctttattttattttattttattattttattttgagacaagatctcactctgtcacccaggctggtgtgcagaggcttgatcatggctcactgcaaccttgacctcccaggctccagcgatcctcccacctcagcctcccaaataggtgagactacaggcgcacaccaccatgcctggctgatttttaaaagttttgtagagatagggtcttgctgtgttgcccaggctggtcatgaactcccaggctcaagtgatcctcccacctcggcactcccaaagtgctgagattaggggcctgagccaccgtgcctgaccgcatttcttcctttgtataaatggagaggtatttatgaattattgtattctcctttaggccaatggaaactcagtcatggatttgcttcattgttttttcttcttttgtgagttacactcagtcattctaatgcatatatgtatacacacacgtacaagcttaggaatgtactatttgtggttgtaaaaatgaagctgctcatcttctgctctgagagtctggaaaagtttataaatatcaaatagtatctgctggcattgtccagcaagacacatcacttcctatcgtgtgggcgcgtccctccagtctagccgtgtgcctacgacacagagctctagttggcatcaggattttccactagacagtccgcgttccccagcggccagctcggaggcgttcccgccctcaaagccacagccaagtccagggcctcagggacaggtctggggaaaatctatcaagtgatttgggagaaccaaggcgtctgggtcgaaggcagggggattccctcccaccctggcctctctgctcctttccagacagacctgccaggcattgccaaggtgctttttaaaatcttcaaacagagttttaaccatgatgtgtggcagacataggtatccctcacatactcataggtatttgctttaaatatttgaaaacaatggaggaatgaagacaggcttgagttattatatattaaagtacacgaaatgagattcaggcttaaattgttgtatcagggtttgaccacagcagaatcaactggagggatttatcgtagagatttaccttatgcaacttggggagctggttcaccagtctacatggggctgcttctttgaatttgacgctggatcctcaagtcagcagggcagccaccaagaaggaaggatggatgggaagtgggagggagtgacgacaaactggagccaccaggacaagctggaacccgggatgacagactggaaaccccccgtccatctcttgccacctccaagcagccatctgtgattactcactcaggtgatctgcaggaaaaggtggcattcttcatcccggaactaaacaggcctctgccaggattcagagacactaaggaggatccacagggactggaagctgcaggcttagctgctgcccacaccaaccaggcgagcccacagaagggtgtccacgtgggtgcactgcagccgcgtgctccatgcccaccttccaagcatggcagcagtctacctgccacttcgcttccccctcccgggtctcactcaaaatgtcttttggtctatgctaaccagaaacaatgcagggaagggaattctgagaattccaacttagctgagttgacatgatccaaatccaccacaattattacattaaaaggcaaatggcagtaagtgaattgactagggcttttattagaaatattactcccactgtcagtttaaatgtagatatttaaaacgtccctaagcaaaaagttaccacatagtaggaaaggctccgaggtcacaaaacctagatccaaattactagctgggtggcctaggacaagttgcttaacctctctgagattgcatagcttcacttgtaaaaagaggattaagagcacctactgcatacagctgatacatataagatttagcacagtggccgcacacagtaggtgctcaataaacgaaacagcaattcatcaaggcacataacaacagcacaacacattgtgtggcactattttcagaatgtatcaatccatttgagtctttcactaacttgtgaactccatgaagtcaagagttatgagtaaatgagtgatgtgaattaatgaatttactatattcctgggtactaggcagagtgggtgtgatcacgcctgcttaagtataacaaactaaactttattgatttaagtgccaagccagggttaggtgcctgatcttctcatgcccacaccaaccaggtgagcccgcagaagggtgtccacgtgggtgcactgcagccgcgtgctctgtgcccaccttcaaatccattgtcctttccaacacaaactgccacatctctcccgcataccagaacattctgggactactatgaagaagtggctttgtgtacagaagctgctccctcttctttcatttcccctgatgttgtagcaaatgcttggagttcttcatagaaccactgttgaagaggttgtgctctgtctgtcttcagagagacctgcatgtgctgctttcactggttaagtttcaccttgtctggttcattcattcaacaaactagattaagaatctattaggtactcagcattgttctagaagctgaggatatagcagtgaacaaaacagacatagccctattcccatgaaacttatattctggttggctgtgggagtgagcttccaagagagccccagggatccctgcctcctggtactcacaaccatactgaatagggatgacttgtgtcacccaatatggatagctggatggctggatgggtgggtcggtgggtggatggatatatagacagatgaatagatagatgatagacagatgataagtagatagataaatgataggtagatgatggatggatagatagatagataaataaatgacagatgggtagacagatgatagacagatggtagatagataatagacagatgataaatagatgatagacagatgataggtagatagatgataggtagataataggtagatggtggatagatgtatagacagatggataaatggatggatcgatggatggattgattagatagatgataaatagatagatagacagatagtagataatagacagataataaataaatgacagatgataggtcagttggtagatagatgataggtagatagtagatagatggtggatagatgtatagacggatggatagatagattgattgattagatagatgatagatagatgatggcatggcagtgacttctgcagcaagatcatatacacaacgtgctttccaccttgctctctctcgaggacatgtattgaatgccaggtactataccaatatgttacattgttttgtcacatttaatcttcatgacagtcttatggggtgcctttcttattcccattttccaagtggtaaaactgagtcactcactctgggggaggcctgctgccatgctgtgaagcctcaagcaatcttatggcaaagttcacgtagtgaggaactgaggcctcgcaccagcagccctatgaggcagtcgtcttgcaaccagcccctccaggcccagttgagccctcagatgactcaatcccagctgattcccaaactcctgactcccagaaactgtaaggtaatcaatatttgttgttctaagttactatgtttttagagcaactcattatgcagcaaaagaaaactaatacctggggagtgatgggccaaaaatgagcaaaatatacagcctgccaggtggtggataagagctctggaggaaaaccaaacagggaaggggactggtgagggaggggattgcaactttaagtaaggtggtcagggaagatctcactgagaaggtgacaggcaattaaagactggaaggagatgagtgaaccatgtggaagggtcttccaggcagagggatgagcagatcagaggctgggaggcaggagcttgagtgtgtcaagggatcagcaaagaggctggtgtggtcaggacaggtgaaggacacagatggcaaaagatgaggccagagaggtaaggggctggaccctgagatacagaaaccctgtgatgagatgctggtcacagtagctcatggtcccggacacatcttggtgccaggcacggcccctcccagcactgccatcttcagtcctcaccaaacagggtagacactgtggccctcctcacttgccggatgaggaaactgaggctcacagagcttatatttcttacctaagtccacatgatcaggatgtggcagagccaggcttcaaacccgggtctgaagtccaccagctggaattcggtggtgcgcagactctgtctatttcccccaggtatcgttatagtccggggtgctcgctgtctgaatcaggatctgtggaatccatgtaggaggttggtgcacctctttcaggccctggatggggcacagaccacaaatggcccaccagggtggaattcagggggtgtccgagattctgaggagtcacgaaggagcctggggttgcccagccccaggggaaagcagggccagcaaggcctacttggcagccgagctcaccagcttggttcccagcttcccacagatatgcatgaatgcatgaatcacccgcgcgcagcctgcccaggacgcgccgttctgcggggaccacagctcccactgcgagcagggccagccaggcagagccttggaaaaatgctgcggcggggtacaccctggcactcggctgtgctctgtgccgccccaaatccgcccgtggcctcctgccaaccgagtgggattcggtacattggtttaaaagaaaaagtcaatagagcacttttgagacgtccgaggcccagatgttagatgttactgctttttctctacaggttatgaaagcaatactaggtgattcttattgaatatgttctgagtgtcaggtgctggaccaatacagtcacatgtaatcttcctgataatcttataggggtgccattattatttccattttccaagtggaaaaactgaggctttgtgagaataatttggttattttattttattttattttattttattttattttattttattttataagttccaagatacatgtgcgggatgtacatacaggtttgttacataggtaaacatgtgccatggtggtttgctgcacccatcaacccatcacctagatactaagcccagcatgtattagctcttttccctaatgctctcccacccccactatcccccatcaggccccagtgagtgttgttcccctccctgtatccatatgttctcattgttcagctcccacttacaagtgagaatatgaggtatttggttttctgttcctgtgttagtttgctgaagataatggcttccagctccacacatgtccctgcaaaggacatgatctcattctcttttatggctgcatagtattccatggtgtatatgtaccagattttctttatccagtctgtcattgatgtagcccctcttttttttttttttttttgagatggagtttcactcttgttgcccaggctggagtgcaatggcacaatgtcagctctcctcaacctccgcctcccaagttcaagtgattctcctgcctcagccccccaagtagctgggattacaggcacctgccaccacacctggctaattttgtattttagtagagacaggatttcaccatgttggccaggctggtcttgaactcccggcttcagatgatccacccacctcggcctcccaaggtgctgggattacaggtgtgagccaccgtgcctggcccctgcccctcctttttaaagctgtatttaggtttcttttgtattcagtgaaagttaaacttatatagcaatgttcactgagtctttcccgtatgctgattgctgagctaagaactgtgttcacgccatcacatttaacccttaccattgtaaggtagggggctctggacccagctacttggatttgaatccttgcctttctgtgcccactgtccttctttctgaaatgggaacagcagcagtgatgtccctctcatcaggtgatttagaggattaaaggacattatagacataaagtgcttaggatcatacctggcacacagtaagtgctcaataaatgtcagctataatccctattacacagatgaggaaactgggtggatgggagaagtaacctgcctaaggttccaccaccagtatggggagggaacaggaatttgaattcaggcaggattctgctgttaaaataaaataaattcaatctcagtcttagatgatctgtgaggattattcttgttttaaattctgcacagtctaatattctacgtgtctataaaataaagaatatggaaccaatatatgtcactacttttcagctaatgacaaaatattaaattaaatatcaaggacccttgtgtgctcagtgctggtaggggctgggaatatcatgaagaataaaccaataaggcagggcccctggcctcgtagagctctggtctggtgaggtaaatggtctccccaacaggacccacacgcagtagtggccctagtgttgacaggaggattcccaagctgtgtgagctcaaaaaggagctccttcccgggagctagggaaggcttcctggaggaggagacactgatacttaatactgaaagaagatatggtaggctgcttcagccatggcccctagaggtccctgcccaccttgtggtcctcacactcttgtgtaacccccatcttagtgtgtggcctgcacctggtgacttgcttctgaagaataaaatacagcaaaataatgggctgtcacttccaagattaggttccaaaccttgtgactttgccttgctgccctctctcttaccctgtccgcttgcgtgctctgctgcctgccatgtcattagatggtaccatggaggggccacgtggcgggagctaaggaagacttccagccgataacttgggaggaaccgaggtcctcagtccaaggacccacgaggaactgactcctgccaacagcccactgtcaacagcgagctggggcccttctcagtcaagccttgagatgcctatgaccctgggagacgcctggagccagaggactcagtgaagccgctcccggattcctgacctatcgatgcagtgcgataataaatgtggttttaaggcactacattcggagagatgtgccacacagcaacagataacgaatacggaagggtagggatcagtcatgtgtcaggagggaagagaaggaaggaggagaggccatgctggacttgggaacagcagtgcagaggcccagaaggaactgagaatgggcccccagcagaaccacagggatctagctgggttagagcgcaagctgcaaataccactctgtaagggcagaaacgcggcctcattcaccaactgccatatccccagtgcctagaatgtgaagggtgggcatgcggtaggtgcccaataaatgtgtaggaaacgtgtggtcaagggaggtgagtggcaacgggaggatcctgaaaagagagctcagggcaggtgggcaaggctgcgggcctcctcacggagcctggacttggtcctggggccacagagcctcagttcacatttcagcaggaggacagaaggacaggctacccgcgagcatggcctggacagaggagccagagacgagaggcaaaaccaggggaggggactgttctgccggtgacagatggcagggaccaggatggccatgggggagaggagacacgtgaccagacctgagtggtctaccagaggcagagccacaggacctgcccatagacaggacatgagggctgagggagtggggatgtcaagggacagctccatttgtggtcggggtgaccacgtggatggtggtgctgcttttggtgatggaaaacatgaggaacagtggacactttgagcaggtcacttctcttctccgtgcattagtctcctcatctgtgaagtacggttagtaaaacctgcctagcagggctattgcaaaaattaaactagataatgcatgaagacacttggaacaagcaaaaagatttatacacccatgggcacaattactatctgtgatttatatgtaatacatgccacagatgctagatgtgattttcacatacgtgatttttatattaaaacattggggaagttgcagtctgggggctctgagaccaccaggagaagtgttcacttttagaaattttttttctagttctatctgtgggaagaaataagccactcaaaggaaataagaaccatcttgctgaaaactcacttttgccagttgtggcaaagacaaattgcattatgtttttgctgccaactgcaaatggcgccctcctgagaaatggcctctgctcaaaccagcagaacctctgaaatcggatgcttctcaggatgactcaggcccagttgcatcttgacatcattcagggtctgaatgttctgtctcgccactacggatgtatagatttcagggttttgagtgctgatggggggaaccgtaacatatttgtgggctggagtcatttcttagtttccaggcctaatcgcagtcattcacatcacagatatttcaggatcttgacataggtgctgacgattctatgtgtcaaatatgtgctatgtcaggcactttgatgttgctaagcttgttaagctcctgaatccccgggggtgatgtgaattatccacagtgtcattctaacacatcagaccagtggttctcacctgggagtgatttgtcccttccagctgttacaactgggggaggtttgggggtggcactgtcagagtaggggccagggatgcagctaaacatcctataatggacaggatagccacaaaacaaagatcggtatcaacagtgctgaggttgcctgggcacggtggctcatgcctgtaatcccagcactttgggaggccgaggcgggtggatcacctgaggtcaggagttcaagaccagcctggccaaaatggcgaaatctcatctttactgaaaatacaaaaaaaaaaaaaaattagttgggcgtggtggtgggtgtctgtaatcccagctactcaggaggctgagatgggagaatcttttgaacctgggaggtgcaggttgcagtgagccaagatcatgccactgcactccagcctgggtgacaagagcgaaactctgtctcaaaaataaataaataaataaataaataaataaataaatagtactgggattgagaaactctgttttagattaacttgtttgtttatggagcaaattctgagcatctatgtgccaggttctgttaggccctaaagataaaactgtgaatgagactggtgaggttcctccccttatggaactaacattctggtagagaaggcagattttaaacaccagtatacaaattagtaatatttcctaagataatttcagatgatgaaaagtgctatgaggacagagacagtgtttatgcatggaattattttccttatatctggcacagcgcttggcatggtgttggggctttgtgagtttacaccagtttgggggtggttacaagtattcagatctgctgttggctaagtatgtgcccttggacaaggtcatctctctgtgcctcagtttcttcatatgtgaaatgggtgttttcataagaaccaccttgtagaatgatgaggatctgataggggacaggtatacagctcctggaacagtaagtgctcaataaatgttagcgacattcattcattcattcattcattcactcttccctccctcaccatgagtccacagaaacagccttggttccatctctgccacctgtgccagctctcattgttttccggtgtctagcacagtgcaatagaccttctagaaggaattagaaggatagtgacaaaaggacttgtatagaaaatgggcacaattgggaatagcccattccagcactggggaggacacaaatgcagctccaggccccacagcaggcccttcagggctcttatgatgaacccgcatggtgggcgtgttcaggcacattggtggcttccacaggtccccagttgcctttgactccttgtatggttttctttccttctgatatcaattcttcttaactatggccagttcccaggtacagaaatgtggctaaggcctcagctttccacctggatgagtcaagaactttttagtcacaagaaagagaaaatctactgaaatgggactaagccaagaaaaggaaatgaactggcacgtaccacagaaagtcaaggtgtggatggattcaggaagtgatgtttccaggaatctctctcccttgatctcacatgctaatttcctctaccttggctacatcctcaggtgagctctttccaagcactggctaaacctccccaccctacccccagtgacaactctggactcacatttggcaagtctagaacctcagctgaaagagagcatgtctttcccaagagttccagcagaaatcctgaggtcaactctggttggcccatctcaggtcatgtgcccattcctgaacaaatccctgtagacaaggggaagtggtgttttgattggccaggccttggtcgtgtacctgccctctgatctggaacaggggcaacctcatggaaacaatctagagtgagaacggaagaggagtgtccccacaaaagaagatcagagcaatttaccagaagtagcagcccaaacattagaggccccctagcccttctttttgagcataaaacccaagagctaaagtccttccaacttaaccaaatgtttgtttttgatgctgtcagccagccagcatttcttgatgagcaggtgtcagcatggggaactcctgtgcaaggggcattgccaaaggatagaaggcttcagggagggtagtgcccggccaggcccaggaacctcctcaatacccactgcgtcctggatattaaccacagacagcacctcccaccccctcatctctaatggctgagaggaaaaggtctcccttgccatgactttttggcccttccttagagcaaaataccccctgggatcccctctctccaaataaaacgtacctaaatttggggacaaactcctgaaactggtttaataataaagcatactcatgatagaacctgcctataaacaacctatttctattttaagtgagaagtgtggataagcctcactcttttgttgagttgtttaaataatttaaatccattttgttggatacttctaaacttcttctaatgttatctgctgtaaaataagaacatgaagtgaaaataactttctaaactttcttcttgttcaatttttaatggaataaatataacaaaagcaaactaaatgtcatgaaatttaaaacaactcttttctggaagattaacttcaaatagaaactgtggaataatagtagtaacagtgatgtttctggaaaggggtccgatccagaccccatgagagagtcctcggatcttgtgcaagaaagaattcggggtgaatccagagagtaaagtgaaaacaaatgtattaggaaattaaaggaataaagaatggctgctccataggcagagcagcagcacgggctggttggctgagtatacttatagttatttcttgattacacactaaacaaggggtggattattcatgagttttctggaaggcggggtggatttcttggaactgagggttcttcccggttttagaccatataaggcaacttccaggtgttgctatggcatttgtaaactgtcatggagctggtgggagtgtcttttagcatgctaatgcattataattagcatatatcgagcagtgagaacaaccagaggtcactttcatcaccatcttggtttaggtgggttttggctgccatcttggcttgggtgggttttggctggcttctttaccacatcctgttttatcagcagagtatttgtgacctgtgtcttgtgataccaatcctgctgacctcctatctcatcctatgactaagaatgcctaacctcctgggaatgcagcctagtaggtctcagccttattttacccggcccctattcaagatggagtcactctggtgcaaacgcctctgacagtaggaatggtagtgtacatatattgcacatctgtgagccaggcattgttcttagcactttatcagtatgagcaaggtactaatattgtacctgttttatagatgaggacactgaggcacagagaagtgaagtaacttagctggggcaacctggctggtcaatgatagagcagggacttgaagctggctcatctagcacataattgatcctaaccactgacccataaggcctagaaggatatggttctcaatcatctcctcttaagaagacctcactctttctagatggcacaaggaggagccacacctcttgagttacctgttttcaggttcattcagcaaaagctgtttcatggctgcttgatgattttacagtgaaggctcagaacccatattcgtaaacaatgagctctgtcagtttctatacctccacccaagttctatagcctacgatcctcaagacacttcacatatacaaacttcaaagccaattatagctagcctgatgtgaccgagggtgcctcccaagccctggcagagctgacagttggcaatggagctgttttaaatgatgtttcattttgatcaagccagaaaaaaatgtacagttactcaaaaggctatttacaaactccagctgtggccactgacccacatctaattgtgctaataccataaacacaagttttgtccgtgcctgtgggatacatttcaagctcacaccgcccccactttttccccattcccacccccagccaagaagcaatttcctttgtcactcacaattgctgcaattagtgttatctacacagccatacaaagcctgtttcctttgctgcatcccaagtgtgccattaggacagctttgaccttcagtgaggtctaaatatcaaaatttgtaggactgcctttgtaaaaaatttcagaggaagagtaccatttcagatttccatttatacccagtcacatctgttagaattaggtttcactaaatagaatagaaaaaaatatggcctaaataagatagaagtttattattctctcacataaaactgtcatcagagatctagacaactatccttctgttctgccaacctcagtatgtgacctctattctcaaggctatctcacaattcagggtagctgctgcagctccagctatctcatccacattctaggccagcagccagaataaactgaagagccagaggaccctcctagcctcctttttacagagccttcctctcatacctcattaaagttttagagcattttcaatttttcaaattttcagagtagagatgctcagtctgtacctaatacaaataagttacttgtatccctagatcacagcctctctggaagaaagggagttagtcccaagaaacaaagactcagggtcagtagtttagaccaaaccaaaggcacatggccatgccttcctgcaagggatgctgggaaatgtagtctttggacattggctgacactgtggtgtcaatcacccttagagatgctgtgtgactagatcacccttagagatgctgtgtaattagaaggaaggagttctgagcacccagcacagtgttaggcatcaaggagtcccctggtgattctcccatcattcactgaagctgactcttcattacttgggactaaatcccttcttccaaagggattgcgatctagggatagaagtgacttattggttttaggtacaggctgacaatccctaatctgaaaatttgaaaaattgaaaatgcttcaaaatctgaaacttttttgaacgctgacataatgcctcaagtgaaaaattccacatgggtacttaacacaaactttgttccatgcacaaaattattagaaatacacaattacctctgctaatataaaattacctctgtatgtgtattattagaaatatataatgattagaatattaattattagaaatatacaattacctctgctatgtgtataaggtatatatgaaacataaatgaatttcctgttttgacttgggagccatcaccaagatatctcattatgtatatgcagatattccaaaatccaaaaatatctgaaatctgaaactcttctgatccaaagcatcgcacataagggatactcaacctgtcataaatgtggttgggcaaagccaaaggaccaatctccctgtgttcccaggagtgtttctccaagctctaccccagatccagctgcaccctcgtgacactttgaagttgagaatctgggggacaccctttccatcctctgtccttctcactcacaacctgcccaacttgaccacacctgcatcacagaaaagctgttcaaggctctgctttgaaacagggggcatcagcgacctgtcagccattccatcatccaacttgccttccttctctcatcttactcccaacccccactgctctttctacaagactagaggtcggctacagggcagggtggctcagaggaagtggggtctcctcccacgggagcccagccttggctgttctcatggttgggttcatcccatggtggagaggtatagatagtggagttgatcagcagctctttcctaataagcaacaggaaagaaggcatcagtgggactttcccagaggaaagaacttgggtcaaagcagtgcttttcaactggagcctattccccacccccctgctcccaccccggggatattaggcaatatctggatacatttttggttgtcacagctgggatgggggtgtgagtgttactggtatctagtgggtagaagccaggaatggtgctaaacatccatggcaaacttgtccaacctacaacccatgggccacatgtgtcacaggacagctttgaatgtggcccaacacaaatttgtaaactttcttaaaacatgccgggcatggtggctcacacctgtaatcccagcactttgggaggccaaggcaagcagatcacctgaggtcgggagttcaagaccagcctgaccaacatggagaaaccctgtctccactaaaaaaatacaaaattagctgggtgtggtggtgcacgtctgtaatgccagctagtcaggcgtggtggggggttggaggggcgccgggctgaggcaggagaatcgcttgaacccagaggtggaggctgcggtgagccgagatcacaccactgcactccagcctgggcaacaagagagaaaatccatctcaaaaaaaaaaaaattatgtgatttttttcgtgatttcttttttagctcatcagctatccttagtgttagtgtattttacatatggcccaagacaattcttcttcttccagtgtgactcagggaagccaaacaactggacaccccgtcctacagtgtagaggacaggcccccacaacaaagaattatctggctcaaaatattaacagtgtcaaggctgagatgccctggcttgaagggaacaatgatggtgtagctcagtagttaagactgtgtgctctgaggtcaaaggcttgggttgaaatcccagctctgccacgtggcaattatgtggctttgtgaaagtcccctaacctctttagcctgtctgcatacctgcagcattggtacctacctctggggttttcaggggtttggatgagttaatccctataaggtgttttatacaatgccaggcacattgtgctccctcaagtttgcaaaactggattgaataagataaatactaatatatatgagaaatttccatgctgagaattataatattcagaccctgtaccgccactaaaaggaaagcaaaggttgattctaaagttgaaaacaaaaaacagaaatctcctgtggttatgcaaatagtgttccatgcagaaccaagaggtgaggctgcccgagagagaagcaaatgcaagtccaagttgccaaacccaagccgtttgaaggaggatggtccaaacaaccgaccaagtggatgctttatcttaccttcccttaactgctcttaaccatgccacattttagattgttggagatttggaccacgcctttcctcacccagatttcttgtgtttcgggcctcatcgagaagggattgaaggaggtgagagaaaaaaccatttggatgcttccagagagagcaatctaggcagaggtaacagtaagcataaaggcctgaaggcagaaacataaaggcagtaagcacaaatgcctggagggagaaggtctggtatgttcaaaggccagcaaggaggccagtatggctggagcagggtgaggaggaaggaggagtcgtggggttgggggacagaccagacccttcttgttcttgggttctactctactgaaatgagaagctattgaaagttttgaacagaggagagacatgacatgacttggttttaacagggtccctctgctattgggtggagaatggactgtaggggggccagggtagaggcagggagcccacagagcagggcactccaatagcccaggtgggagaggatggcagtgggatcagaggggttatggcagagaaggggaacagtggttggatttttggtatattttgaagctgggccaataggatttgctgatttatatggtttagtgctgtgtccccacccaaatctcatcttatagctctcataattcccatgtattatgggagggacccagtgggagatgactgaattatggtggtgggtgtttcctgtgctgttcttgtgatagtgaataagtctcatgacatctgatggctttaaaacagttttcctgctcaatctctccctttgcctgctgccatccatgtaagatgtgacttgctcctccttgctttccactatgattatgaagcctccccagccacgtggaactgtaagtccaattaaacctcttttgtaaattgcccagtcttgggtatgtctttgtcagcagcatgaagacagaccgttacactgatagattagaggtggaggatgagagagaatggcatcagaggtgactccaagtgttttggcctgagcaacggtagagtgggctggctagcagccccccagagatatccccaagtcacaacacctggaagctgcaaagtcaaccttgtttggaaaaggaatctttgcagatgtaactaagttaaggatttcaggataagattatcctggatgtggggaggccctggaatccaatgataggtgtccttataagaaaaggacaggacacagagacacacggaggggaaggccaagagaagatggaggcagagattggagtgatgcggcttcaagccaaggaaccccaggagctgccagcaacaaggcatgctggagagaggcaaggaacgggttctccttcagaggccccaggagggacccactctgccaacacattgataccagacttgggcctccaggactgggagaggatgcatctctgttgtttttagccacccgggttgttccttgttcccacagccctaattaggaaacagatacaagctggaaagacggagttgccaccaattgagatggaggctataggaggagcaggcagtttgtgcaaaggggatgggggaatccctataactcctgtgcagggatgtgagggtcaagaaggcactgtgggtgaagcatctcccatgcctgaccttctcccacctcttcctgcacctgactgctaggctcaggtctctgtcctccaccccttcctcagataggcctgccttccccattgcctaaaatgtccccatgccacccacggtgccccatcatcctgcctcattttcctcccagcacttaatcttctctgaaataaccatattctttgattgcttttggtcctgtgttttcccaacaccgagaaaggctctcacaatctctagatttgcacaaaggtggggctttctctgtttttatttgattttttgttgttttattttttaagttttgttttcttttttgactccgcaagggtctgggcagtgcctggcccacagtagactcctaagaagtgttcactgaggggcaattaggaggtgcttagtggctgcaccagaccttcagcatcctagacccctggctctgacacttactgcttaagaatcaccagggccacttactgaaaatgtacaatcctgagagccggacttactaagtctgggtttggacttggaaacatgcatttttaacaagatctccactgggttctgatgccagtgtcctggagggggccacacttcatgataagctatcatcccaacccactcagggaatggcatggagtccagaattgctattggaacactgccctcctcggaggctcctgcctgctggaggcgtggtggcctgatgattggcatcactcctgtagcttgagggtccagagtgtggactcacatggcgcttcagacccttctctgaagcctgactctttgggggcagtgctgcagattgacaaagggtgtttctgcacaggcctgactcacacaacactggaatgggccgggaaggagcctcccggccagacgcccactttggtaccagccctgggttatgtaactccagatgcctgtgactaacccatggccccgagggcatctctgggtggggaaaagatgagggctgacttctccagaatttaaaacgaaacatctcaggactatttataaaagcacaggacacactagggggaagttcagataaaggccgtggaggggtgcagacaaggaaagggaaccaggaggtgtacttgcaaacttgacctactaaaggcatggcttccagagctctgaggacagttgaccttcaaaacaacgattgaccttggggaaaggatgagtcacagaggctccagggcctggttcctgctggcagagcttccagcctctgagtcccagagtgttctctcctaggagtgaaacatgtacttggtagatgtcggctgcctccaccaaatgcaaaaacgcatctcatcctgtgagctgaccttgctggggtgaggtctacttcttggggaagaccctgggctgctaactgggtcttggctggtcctaggtttgtggcaaccagtagtcactggatccatcgatgagaataaatcttgttggcatgtggagacaaggccaggtagaagcagaagtcagagggccaggaggcaggtaggcccctgtctctatgttaactcatgccaagccataatggcagctcacgttgatggagctgtccatgtgccagcccctgcctgaagtgcccgcaatcatctctcgcttttcttcgataacggagtgagagggaagagcacggggctgagaatcagggggcccagatggaagacccactcaccgctaaattgttggggggcctgggatgacttattacaatattaataatgaccacagcaatgactacagccccattcattgagcactcggcactcatcatctcattaagccttgtcctgcaatgccagaggctttggaatcagagctggagttttggaatcagacagagctggagttcaaggaagagctctgacacttatgagctagcaaccttgaacgcatcatttaacctttaggggctcaaaaacagccattgtttattcatctcacaaatatgcagtctgggcaaggcttggcaggaacagcttatgtctgactttatgtggtgtcagctagggtggcttgcagaaaagctagcaaccaaaatccccgaaggctcactcactcacagatgatgccgatgccaataccaatgacgatggtgatgcagatcatgatgcagatggtgatgcacgtgctgatgcaggtgctgatgctgaggcaggtgctgatgcagataatgatgcagatgctgatgcaggtgctggtgctgatgctgaggcagatatgatgcagatgctggtgcaaatgctgaagcaggtgttgatgcagatactaatctgacgcagctgctgatgttaaagcaggtgttgatgctgatgcaggtaccgatgctgaagcaggtgttgatgcaggtgctgaaaaaggtgttggtgcaggtgcagatgctgatgctggtagtaatgctgatgcaggcgctgatgctgatgcaggtattggtgttggtgcagatgttgatgcagatgttgaagcaggtgctgaaaaaggtgttgatgcaggtgcagatgctgatgctggtagtgatgctgatggtagtgatgcttgtgcagatgttgatgcagatgttgaagcaggtgttgatgcaggtgctgaaaaatgtgttgatgcaagtgcagatgctgatgctggtagtgatgctgatgctggtagtgatgctggtgcagatgttgatgcagatgttgaagcgggtgttgatgctgatgcaggtgctgaagcaggtattggtgctgatacagatgctgaggcaggtgttgatgatgctgctggctctgagctcaaacagccagagctccttaggcatttcttttcatctctgggtgattcctcttcatgatctgtgcagcatggtggtttaaggatggctgggtttgtgacatcacagctcagggattcaaagacatgtgtcccaaaagaaacctgcagaagctgtgcagcctcagacatcattctggcacttctgccacattctattagcagaggcagtcaagaattcatataatgtgcttctgtcataaaatattactcttctttttatttttttcaactacttaaaaatgtaaaaaccatttttagttcatgggtggtacaaaaacctgcagtggaccagatttggctcctgggtggtcattggctgacacccaaattagataaacagccttagggcccagaacccagtcagtgatggaatttgagatgtaatgagagaatggggactagcagaccatcccaaaggtccctgccaagttggagaatacgaagctctctccttagcctgaccacttctcccaaagacagaagcctctgccaggatcaggaatggacaaatgtggccattcttctatggcctcatgagtaagccatggccctgggggtgaggataacagttggattcagaggtcagcatgttggaaggttcatgagctgatgagagctgccccttgatagttttgcatcttggagaagcgggtacctatcatctcacctccccaaatttgtgtcctttcccataaatagttgctgttgctattttgggaaggcaaaatagcatcattgtgaagagtgttggtctcagataatcttgagttgaatcttgctaactgtgtgaacttgggcaacttacttaacctctctgtgcctgattttcttcatctgcagcatggagttactaatgactacctctcaggattaaactaaaccatgcatgggaagtgatcagccagggattagggagtaatcaagaaataaatatcaattgttttgatgttgttaatattaggctgagtgggggccaggcacagtggctcacgcctgttatcccagcactttgggaggccgaagtgggcagactgcctgagctcaggagttcaagaccaccctgggcaacatgacaaagccctgttgtctctactaaaatactgaaaattagctgggcatagtggtgggcgcctgtagtcccagctacttgggaggctgagggaggagaattgcttgaacctgggagatggaggttgcagtgagccgatatcccagcactgcgttccagccttggcaagactctgtctctaccaaaaaaaaaaaaaattaggctgagtaaggactgctgccttcatggggtggtggctagtcatggtggaagacgatggtatttgtggttgcaatttgaaacgcgctatccttcaagctttgaacctggtgagatatagacacaaaaaacagttggtgaacaaaaaaccagcctcatcctgataaagcagcctagaagaaaggcatgtccctgcccactgcaagctatagtcaggaaatggggagtggcccttcaaggcacagggagatgccagaattagacacatgaccacaccggacagcaagggtacatgagaaaagcatttagtataatagttacatgtttttatgggtgccttctttatttgaaaaatggtgctaatttattatttttatttatttatttttagatggagtctagctctgtcacccaggctggagtgcagtggcgtgatctcagctcactgtaaactccgcttcctaggttcaagcaattctcctgcctcagcctccccaagtagcgcggtgactcatgcctgtaatcccagcactctgggaggctgaggcaggtggattaatttattactgatggtaatgatttttaagtttcctttaaaggacgtttatgtaagtgaaaagaaataagtcatagtaaagctgatacccggatgtagactaaactctgaaggcagcctggatgactttcatttggcaagctccgtaggcaaggctgggtccccaacacagccctgtagatcctgtggggagtaccaccaaatttttaaagtggatttgtaaggaggagaaactgaggcagcagttgaagtggctttgccagggccactcattaaagagtctccggccagcaggggatagatggagaaagaactcatcagaggcctgtagactgcgctggggagaggggatcgtgcgtctttgggacctggctgtctctgtcccaccccagtgcctttgggctctccctagttccttccctctgctgcctttctggggcagcctttaggagaacagctctgacctgtcctttgtatcttagcaggaatgagtttgatttgagaagcggattccttctccccgggaaaggcacaaagttttctttccaagtgcaggttgaaactaactcctggtgaagaagctcacggcaccatccagcatgtacgtgaggagttttgtgttcggaatgtttttaaccctctaaaattatcccacaagctcccagacaatccagcaatgcaacagtgtccctcccccacagcccaggatgaatgacagtgtggggaagtgcacgttggattctatgccctgctctgccactggctggctatgtgacctagggcaaatgactggatatctctgagcctccatttccttggtgcaaaagtgcagcaataaagctagcctttcaagtgtgagatgaagctgccacagccaacacaagggcccttccatgaatgtcaggcttccttgcagcctgtccccccatagcatctcaacaggcaccctagcactcatcttgaaaaataaggcaagacttcatctccctacccaccctggaaaatgatgggagatcagtgctgtggaggaatagctcaggcccccaagtaaaaaaagaaaaaaaaaattgggtggggcctaaggaaatggccagttccagagatgcgtgcataagatgtatattacaggagtgccgtcatctcttggtatccgaggcagattggttccaggactcccatggataccaaatctgaagatgctcaatttcctgatataaaatttacatataacctatgcacatcctcctgaatagtttaaatcatctctagattacttataatacctaatataatgtaaatgctatgtacatagttatactgtattgttttttatttgtattattttttatttctgttttttttttctattttcaaatgttagttgaaaccaaccaaatattggttggttgaatctgtggttgtagaacctgtggatacgaagggccaactgtatttacaatggcaaacatttagaagcaatctagatgttaaatcttatgggatttgctaagtaagtcatagcactgccttaaagtggagctggctttatgttgattgtacacttgtgtttactgtgactgttggttgactggtcagcattcactccctcttcctccttcctcaggacactcagttttctttggatttctgcccctttctgaggcagccatgagactcaagagaagctgaccccatcctttgctctgagggtaggctctagctagtctaagcaacgagtcagcacactttttttttttctttttgagatgggtgtctcactttgtcgtccaggctggagtgatgcaatctcagctcactgcaacttctgcctcctgagttcaagtgatccttccacctcagcctcctgaggaccacaggcatgagccaccacgctgggctaattttttgtatttttggtatagatggggtttttccctgttgcccaggctggtctccaactcctgagctcaagcaatccacccacctcggcctcccaaagtgctcagattacaggcatgagccaccgcacccagccagcacgcttcttatataaaaggccagatagtaaatattttaggctttgcaggccatgcagtatctctcacaatgaatcatctgctgttgaggcagacaagcagccattggttatatacaaaaatgattccaataaaacttacaaaaccaggccatgggccacatttggccagcaggcaggagtttgcccactccattataagccattcatgatagcccaatcccccatcaataattgcttcagaaactcagtctgaagcccacgggcagcaggcacagccctggggagagttattggtcccgcagatgaagaagaataacagggaggcaatgataggtcagaaaaggctcctagagttggtgacatttgagctggggcctgcagctgaagaggcagttacaggaagagcttgtggatgacgatcccaggcatggggaactgcagatacaaagacggaatcaggagccagatgcagtggctcccacctataatcccagcactttgggagagaggctggtggatcacctgaggtcaggagtttgagacaagcctggccaacacgttgaagccccatctctactaaaaatacaaaaattacatgggtgtggtggtgcacccctataattccagctacttgggaggctgaggcaggagaattgcctgaacctgggagctggagtttgcagtgagctgagatcacgccactgcactccagcctgggcgacagaatgagactatgtctcaaaaacaaaacaaaacaaaacaaaacaaaaccagagatggaatcaggaaaagcctggtgcctagggcggggtgaacaagaggtggggacggagggtggcatggatgggagggggatcaccagggcctgttcccccagtaaggagcgtttgaagaagccactggagaattcaatcaaggattttgagaagtgatcttgtgacagaggcctcaagaaccatcgcgaaagttacacagccgatgtttttctttttttctttactttttttttttttttttttgagacagagtctcactctgtagtctaggctggagtgcagtggcaggatcttggctcaccacaacctctgcctccctggttcaagccattctcatgcctcggcctcctgagtagctgggattacaggcacccaccaccaccacgcctggctaattttttgtatttttttgtagagatggggttttgccatattggccaggctggtttcgaacttccgggctcaagtgatttacctgcctcggcctcccagagtgctgggattacaggcatgagccactgcacccatccgagagccaatgttaatggtagtcacggctcggtggtaactgtcacttttatgcgtcctaatttttctataatatacatacattatttgagtaagaaaaataaacatgtttgtagcgggatcagatttacgcgtgtgcaacttgtgcgactgcacagggcctcgtgctcagaaggactttgaacttagtttcatacactgcttttgctatcctaaaattcttaatgattttatctttgaacttaggttttatgagtggagtctgacaggacaagggagtgtgtgcctgagcagagaacacaggcacaggacactgtttttttgtgcgtttttttgtttttgtttttgtttttaatttttcttttgagacagagtctcgctctgtctctaggctggagggcagtggcttgatctcggctcactgcaatctccgcctcccggcttcaagcaattctcctacctcagcctctcaagtagctgggactacaggcacacaccaccccgcccagataatttttgtatttttagtagagacagggcttcgccatgttgggcaggatggtctcgatctcttgacctcgtgattcgcccacctcagcctcccaaagtgctgggattacaggcatgagccatcaagcccagcccaggacactgttttcactgtgccccacgatttcagagttctgtgtgagttcagtgagacttagagcaaatacaaggtgaacgtcccatgtgtgactgagtaggaagagacgctggcagctctgaaagccatgttctttctcagaaccattcacttgctgtcaaggcagaaaaaaacatgcatggcccaggaaccttttcttacatgtgggacttccctgtagtggtcaaccatttattgctacacacgatgacttttccagaaggggaaagacagggtgaccagggttccttctcctttcaacccttctttattcatcagtaagccagaggcaatgtaggtataaatgtgcatgtctcaaggagtgaaatagaaacaattgagaaagttttgtgcaacgtttccactaccctggtaagaacaacatatatacccatatgcaagctccaaaacacgaatgttaaagtttcagtgatgctgccgatgggctccatgctcataggcttctatttgaaattgggattgcataatataaaaattcatttatatttaatttaatttaaaatatttaaatttttttttttttgcttcaaacaataataaatagcaaatttttaaaagcacaaaaacaccatctcaagagagggcccacagaagaaagcaaaaagaaaaatgtttacgttagtatctttagtgacgctttttgtcctgctttgcaaacagggaccctgcattttcctttcgcagtgggccatgcaagttccggagcgagtcctgtgtgctctacagaaagaaacgagacacaatgagcagggacacggagctgtgcttggcgggagcgggggtgactctgagcccaggccctgcctcccacacccacatttgcagagaggaaggagctgtgagatttgtttgcactcagttcagtgaatcaagtcgccaggcgggcatcagcagtaccttagactctatcacaatatttcctttggctcccgtcttcaccttaaaggtgaagttgacgggggtttgcatggagctgctctgagctcactcccttgggtcactctggaggcgtgcaagcacgaagaaagctcatttttctgctctcaaaaacaatcatgccctttccttctctcatttattttttttattttgagtccaatttagaaagggctgggggccgtgactcagtccttcctcatgctccttaaagaggccgagttcaggagcatggagctcagctaatctccaggggtgacatttatgagccacaggggtggaacgcatggctggttttcctgttggaacattcgggagctgtggcgtggggcaccctgtaccaggtagccctggggtgatccaccacccccctgcagggacagccccaaagactcctcagctgtggagctggaggtgcagggtagggagctagggcaaggggtagccggtggcctttccagggcctgggtgagggccggtgctaacagaaccttccagcaccttctagtgcccacgcctgaggacaaggtgggaggaccacaccctggagggcagcccggtgcctggtagccctcagtgatcaggaaggaaatgagagaggtaaccttgccacctccctagacccgtagtaggatgatgtcaccctctggtgacagatggagtggggcttgtggaatttactgtctttagtgtgatcattcagcaaatgagcaggatgtgttgggggaggagcttggctttggcaccacttggatatgagtttaaacaccagctctgccagtgaccgtgggtgacacatagtgcctcccagagcctcagttttctctctgtaaaatggacataaatactctgaacaagcaaatagttagaaggcgcacactagcaaccagcatgggagctgtgatggaggtggtgatgttgatggtgacccacctggggccagacatgtgcttagcattggagatgcaaaaagaaagaagcctggtctgtgtcctcttgttactcaggtctcatcttcaaatgtcccctccccagaggggcttcctgggtggaacgatctcgatgagccactgtctcaccttacatgttcccttcatagcctgcatggtctccatgtgcccagtcgtctttttgcccagtaggccctccatggggttagaagctaggttcaattcattcatctctgcatccccactgtctggcagagttcctagcacagagtaggcatttgatcaatattaaatgtcatttattggtttactgattaggagccataaaaaggtcatggtccctgtcctggagggttcgctgttttgtgttcacatcacagccttgtctggggagctgcatgtcagggagctgcatatcaggaagctgacactgacatccgattgaggaagccctcttcgaaattaagggtccatcccagcctttcccatcagtggaaatgtaccgtgtgcttccctcagccaaacttaagtaggaagtaaaatgcatgtgaaatataaagccacagagagcaaatcttgcaccggagtagatcatgagctctgagaccccatgggggtgcaagtgctggggctgccaccagccagctgggtgatgttgagcaagttcctttagcctctcaggatctcagtttcctcatctgtaaagtgggaatgatggtagctcacctacctcatgggcttgtagtaaggatcaagtgagatggcttgcaggggtgagcactgtgttggatccagccggtgttcaatggtggggagtgattgggggtgattccacttccgttgccttggtgagagccttggtcatgtagctgccatccctgcttgcaaatcccaccttcatcacttactccacagctggtgttgggcatgatacctcaccagctaaacctcaagcctcagtttccccacctgtaaaatggggatgacactggaactttctgcaaggtttgttgtgagaattaaaggagatgttgagccttatctctggcccctccccacccctagtcctgagggcatccctagtctcagccttagaagggaaggggtgggaagcgggacagggaccttcaggcaagggatggaatccccttctgacttaccttcctggttgcaagtgaagacctctgtaagtcctctgctaacatggttgagtcaccttgggcacacagcctgcgactgggtttggttttgtggggttttttttggttttgaggttttttttgagacagggtctcactctcttgctctgtcacgcaggctggtgtgtagtggcgtgatcatggctcactgcaacctccacctcccgagctcaagcaaacctccagcctcagcctcctgagtagctgggactacaggcatgtgccgccatgcctggctaatttttttttatttttttaaatacagatgagatcttgctatgttgcccaggctggtcttgaactcctgagctaaagtgatccttctgcctcagcctcccaaagtactgggattacaggcatgagccatcatgcccggcctgcaactgggcttgtattagagaatcacagctgccctggccgtccacaacagtgagtgaggctcttgttcccccatcagccagtggcatccctcccagagcctgagcagccagggaggaaaactccccatccagctgcctggcttttctcggcaggggcaagggtgaaaggtggggtgatggggacactgcctgagctccaaggggagggtggcatattaaagggacagttgggatgtcaaaaccctccatggctcctcactggcttggagaaatacccagaaaaatgccacatggtcacaagcccagcaggatcctgctctgtggcctgcctgacctcatcccctcctgctctctgcctccctcagcaaacctcaagcaaacctgacatattcgcacctgggtcttggtgcttactggtacctctgcccagaatagttatcctaggtgtgcacatggctccttcctttctctcgttcagggtctgctcactgagaccccacttcactaacccctgctctttccctaaagtgctttatccttcttcgcacccatcatgacctaacttatatttatttgtgtctccctctagaaagtcggctccagcagataagggatttttgtctctcttgtatgctgttgtctcccctgctcctagaatgttacctggcacataaatatttactgaatggatggatggatggatggatagatagatgatagatagatagatagatagatagatagatagatagacagatagatagatagataatgggtgggtggatagatgggtggatgaactggtggataaatgggtggatggatggatggatggatggatgaataggtgggtgggtggatgaatagacaggtgggtgaatgagtgatgagtggctgggtgggtgggtagatgggtggatggatggatgaatggatgggtggatggatggatgggttgatgagtagatggatgggtggatggtggatgggttgatgggtggatgaatgggtggatggatggatggatggatgaatggatgggtggatggatggatgggttgatgagtagatggatgggtggatggtggatgggttgatgggtggatgaatgggtggatggatggatggatgggttgatgggtggatgggtaggtagatggatgaataggtaggcagatggatgggtgggtggatggatgggtagatgggtagatgggtggacaggtggaatggtggatggatgggtgggtgggtaggtggatggatgaataggtaggtggatggatgggtgggtgggtaggtggatggatgaataggtaggtggatggatgggtgggtagatggatgggtggacgggtggacaggtggactggtgggtgagtggatgaatgggtgagtggatggataaatagatggatgacatgtgatggggtgactaaacaagttgagacccactgatagcagttgacatttgaaaggagaatttcagctggctctatgctctttggagcagctgtgtaacactgcatgctgattacttggccctaagaacctcagtttcttcatctgtgaaatgggaataatgagcttggtagagtagtatgaccatgtgatagcattcattgacttctcggcatagttagtgcctggacctcagtgacactcaggaaatgtttgttgctatgattttacttctggagtgtgtctagaaaggaagatgcggaggaaagggccatggcagttcacattcagcttcttgggaaatacaggagcccaacctgccaaatatgtagaatgagcgcagagatgaaaagacaggctttggagtcaggcctggggcagaaccaactcttccactttctagctgtggtttggggcatgtcgcaggactctgctaaacctctgtttcctcatgtgtggctggggatgatacagaacttcctgcatatggccgattccaggattaaacgaggaaactccatgtgggcctggcacatagaggcactcagcacttagcatcctccgtgtgcaccagggtctcaacacacacctcaaatctcctgctttttaaatgtcagtgtgtcagagaccactctgtctcccccagattgattagctccttcttccttggcaatggtacctttgggtttgagctgggctgctgccaccctgaataagctacatctccagcagctacatgtggccaagtgatcagcttgggccaataagctgtgagcagatgtgggcaacagccaggctgggccctgagaaggagggtcacaccctcccctccgctcttcctgccagttgaatccagacctggctgacctgatggtgaggcacactgtggaccttctggtagggaacattctggaaggaagaagagcaacaagaggaagggagcctgggtccctgcccacagagccacatatccacctgcttatcctgaaactgctctgggggagaactacaaacatctctttgctgttatttggggtctccaggtcagcagctgaaactgtaccctacatacctgtggcaactacttcaagttgtgaaataattgtgcagaataacaccttgtaaacacatccatgggctgggcatgacttgtggaaccacttgtttgcaatctctgcttagattcagaaacctgacccgggaggagagagcaggaaataaacctgttttgttaggagagcatcactctataacagtgataataatgaaaaggggctgggcgcagtggctccccacactctgggtggctgaggcgggcagattgcttgagctcaggagttagagaccagcctggccaacatggcaaaaccccacctctactaaaatacaaaaaattagctggggatggtggcgggcacctgtaatcccagctacttgggaggctgagacacaagaatcgcttgaacccaggaggcagagcttgcagtgagccgagattacaccactgcactccagcctgggtgagagagtgagactctgtctcaaaaatttaaaaataaaaaataataatgaaaaggctcagtaatctatggtgagctgactctatcaagactatgcccttccctttccctgcactatctggttgaatcctcaaaccatcctacacgagaggtcctttcagaggtacaagtgtttaagacattaagtgcagaccaagacaggctccacccaggaccagcaggtggtcacaggaacctctgacatgagatattccaatcccttcacccaagttatagatgaggctggggccagaagagagaaggacaggtcctgcccctggacagccagccaggtagtagcagcctggggtcttgggagaggcatcactgcaggtagagaagcagaaagaacaaatttgcaagggagcaggggattccctggctcgtggggtgggggtcagaacttgctccaactccttttaaagtggcctctagaaagcagatgcccaaagggtccccggcgtgtgatgagacgggatggggcgccttgcagagttggctgcgatgcccgccccagaggtgtcctgagcttggccgctctcaggaatcgccctctctccctcaccctgccgtcagcagccctgactcaggcttctgtcatcacaggaaagctgttttcccaaagcaaggaggtctgtggtgtgcttatgggcagccacaaatgaggggtcactgagctgccaaactgcaatagagcaaaggctatttttaaccaagagagggagagttagggggttagaaggatatcctgacaagtcagaaaaaataaggcatcacttcccgggttgactcagagggccaggcttgcatctctcagtctcctcttgaaccctgtacattttttgcagaagagtaatatgtaggaacatctcctggctctgccacttactcgctgtgtgaccttggatgatttatgtaacctctctgagcctcaactttctcatctgtaaaatggaaataataggagtaatgccctggcaggactgtaaggactgagatcatagcagtcaagcccccagcgtgaatggaacgctctgttgatgagcacgtctttaaccagtgtctgagcttcctactgctgctgtaatgaatcacctcaaaatgaatggcctaaaacaatgctggttcaggatcttacagctgtagaggtcagaagtcctagagtcaagttgtggcaggcctgatcctcctggaggctccagggcacaatctgtttcctgcttttctagcttccagaggctggccacgtttcttggatcctagccccttcctccatctaccaagccagccagcagcgcatcatcttctaatctctctctctctctgtctctctctgtctctctctttcacacacacacatacacacacaaacacacacactagtctctctgtctctctctcttccacacagacacacacacacctctgtctctctgtctcttccacacacacactaatctctctgtctctctcctacacacacacacacacacttctgcttccatgatcacatctcctgtctccttctctgacactgatactcctgtctccctcttctaagaacccttgtgattccattgaacccacccagataatccaggataatctccccctctcagaatccatcacttagccacatctgcaaagtccttttgtccttttgtcatatagagaaccatattcacaagctctggggatctgaatatggacaactttgggagccattataccagttttccactggtgttgtggaagatggaataatgatttttaaaaatgggctggatgggtgcagtggctcatgcctgtaatcccagcactttgggaggccaaggtgggcagatcacttgaggtcaggagttcaagaccagcctggccaacatggtgaaaccccatctctactaaacatacaaaaattagccagaagtaatggtgcatgcctgtaatcccagctacttgggaggctgaggcaggagaatcacttgaacccgggaggtggaggttgcaatgagctgagattgcaccactgccctccagcctgggtgacagagtgagactctgtctcaaaaaaaaaaaggccttagaagacatcttagggtgtctgtttgggtcttctttgttttaagatatatgcaacaaaggcccaaataacagtggctaaaacaagattcaatctcaatctcgatctctctcaatctctctctctctttcaagactgggctgaggtggctgctctgctccacacagtctgtaggcctgaggaggtgtccatcacgtaggttcctaccccctctactctgatgctccaccatccgcagggtgttcagagcacgtcctccacctctgcagcctggccaagggaaaggtgacaggcatagcacactcccttccctctacagtcacacccaagtgaccttcacttctgccaccaccacattggccagaacttggtcacatgagcacacccagaggccagggaggctgggaaatgtggctattccaggtggccacatgcccagaagcaatgggagttctgctactgaaagggagggagagaatttgtgttggggacaaatagcaatctctgccacagggctgctagagagaaaaccaagttctccaccatagacatggggctaatgggggagaataagcagctcctcccaaggatggatattccagggtaaaaatgcccatcacacatatagttggtggcttacccaagatctatctttcttcttcctttctaagagaaaccctagcttgttcaaggtcacagaatgcttggccaaaaagctccatctcccagtctcctatgacatcatgagatataagaagtctgctgggggtttagccattgaattcctggtgtgtgccttcaccccaccccatttgcttcctctccccaccagaagctcaggagtgagaccacaggggcagcagccatctttcaagccctaccagggggcaactaggaagagctcaagtgcttaatgatatctctgagccactctaccactggtgattgtctacccttagacgtctttctacccaagaaaaagtaacctcttgtttgtttaatcccatttgctttgacaatttggtgtctccctggcctgcctatatgctctctgcccttgttccctatagcagcagtccccagtatttttggcactagggactggtttcatggaagacagcgtgtcaatgaaccagggtggaacagggatagtttcaggatgaaactgttccacctcatatcatcaggcattagattctcataaggagcacacagcctagatccctcaaatgcacagttcacaatagggtttgctctcctatgagactctaatgcagctgctgatctgacaggaggcagagctcaggtggtaatgcttgctcacctgccactcacctcctgctgtgcggcctggttcctaacaggccacagaccagtaccagtccatggcccaggggttggggaccactgtcctgtagggaaccttgctgggcagtgttcatgtccatgtatacacagcccatggtgtgtcttgccatttcagggagagtcccactggggaacaagaccatatagggttgtccaggaagcccatgtcacttacagaaactaaccaacttggtcctttatttgtaaatgtgaaaccacattcagggcatcgaaagacatctgcagaaaacaaatgtcacaaaaagggaagaatcaaagtaaataaactgaatacttcatactggaatgatatgagatatttccagggaaagattttttttaagttttcattctagtttgtgtcttgaggaatatttgagagactgtcacatcaacaaaactagagtagattattgtgaaaactgagcagttggagaacaagaaatgttcttgacaatgaaaaatataattacatttgaaaatttcagtgaatgaaaaatgaaatagacatggctgatgataaagttagtaatatggaagacagaattgaagaaatctcctagaatgtaggatgactagacaaaactagaaattagaaaagttgagatagaagaggataaatctaggaggtccagcctctgtaaatgagcatttcaaaagaagagaagagaaagattggaggaggaagaaacagtaaaaggaaggacaacattttattgcacatcttgacttgagtcttcagtttacatagttccatctggtgccaattgcaatgcatacttgcaaacatcagagagaattttgaaactttacaaataaggactacaggcctttggaaataataatttttaaagtggtcaattataaaagattgaaaatcatattaacaccagatttgttgtctattgggatgccagaagatgataaagatacatcttccatgttctgagggtaaagtactttcagctaggattatttatatagataagcaaagatgctcttagatatttaagattttgaaaatttacaaataatatactgtatatgaaaaaattacccaaagatatatggccatctctccaaaagaaatctaagaaagaggatggcataaagatttttttttttttgaggcagagtctcgctgtattgcccaggctggagtgccgtggcacaatttcagctcactgcaagctccgcctcctgggtttatgccattctcctgcctcagcctccccagtagctggaaccacaggcacccgccaccatgcctggctaattttttgtatttttagtagagatggggttttaccgtgttagccaggatggtctggatctcctgatctcatgatctgcccgcctcagcctcccaaagtgctaggattacaggtgtgagccactgcgcccggcagcataaagatttttaaaagtggcagttgacaattatacagaagaggcaaaggatactagaaaggcacttaaagagttatctatgaaatctgacacttggaaaattctcctttgtgctgtaacggttctgtgactcgagatcaccttttcttctccatgagtctattcacacttagttccttggtgaatactgttctaaactttagaacagaataatgagaaatagtagctaacagttattgataccacatatcaggtactgttccaagcactcaacatgaattaacattaaatgttttaattcttcatcttcatgacaactttatgaagcagttagtatcattatccgcatttttactcatgagaaaattggaacacagagaggttaagtaacttgcccgaagttatacagccagtaagtggcagaggtgggaattgaattcagactaacattagggtccatgatttaaaattttataactaacgtggatgggagaggaggaagaacacacaaaggtcagaataattgcagtaatttcctaatctttcaatgcaaggaatcattgaataccatatagaattgataaatcaagaagtagaagcagacatattattaaaggtagactttaccatcagaaaactagaatagccaaaaccaagaattaataccactgaaaaatgggcttaggagtagtctggcagaagaaaactttgttatgcttctctttattattgaaaaaaaagtttcaccctatgtatatattattgctatcactttagaaaccagttcaattttcaaaaaagatttgatcctgtaagtttagtgagtcaccttgacaatcctgagtggaaggtgagaacattggcctaagagttgtggtgaagtatggagcccacctacaatttcccactcggcctgcccatctctgtccagccaagtctccctccatccccaggaaaagtctgtctggcaaagagacttccaagttcagagcctggggagacacagccttccaaaatgaagccctaagattcctgggccatgactgtgtctgcccttctcctcccagagggcgaggatgacagattctggggccctgggaatattgggaggaaggattccagacactggaaatagagttgccaacagaggcactctgggcactaaaaagcccaagtctaggcctggcaatgtcccccaggtccccagaagacatcgtgggggtcacattgctccagctttggggtctttttcaagctcactcatcgactattcccaaggcctgcaatccttcagcctcctgccacccctccccacccaccagttttggttttcgccttggctgcaggtccctggggttccaggcccctggattccatccctgtggttctcaccgtgagtcatggtggctctgctgtgccgtcctcgctatctcggggaaccggagatcccccttaattccctccagctgtgtctctacagggctgaggtcatccattctggctcaagaggaaagcagagagtttgttgtgtctttgtttcattcaaatggtttggacggtgactcactccatttcttctctcttttctttttaaaccagggcaccgtctgggagtcgtttttgattagaagttgacctcagaaatatgctcacatcattttgaaagcatcttccagcaccacagaaatcgactcagatggagaaaggacactgagtggacaggggccaggatggggcgtggacgctctgcctctgccggggacaaggccttcccacagactccctggggtgttgccagcctgagtcagaggtaggaggccagccctgtcgagcccccatacacttatgtattgacctggggccagtgctgtggatggcaatgaccatcatcatcaccatcgtcatcatcaacactagctactattatcaagtgcttattccaacccacatggtttctaagggagtcacatgaagtgacctcacatcattctcacagcatcctgccaggcaggtaccattggcgtttgccatctgagtattatcaccatctgaggtcccactcaggagctgggcatgtcggtgagtaaggtcatgcccttgacccactaggtgcaggaccctccagtgggtggaatcacgggtctcattatgaatgtgaagctcccaaggcaaggtctgcctggccctgaggcagcaggtatgaccctggtggggtgggaaacggaggtcagaggttgtgagctggacctgagtcaggtcagaggttcagtggtatctgggaagtggctccaggcggtgggctgttggctgcacaaggatggagggtggcagaaagctgtgctttaccgagggttttgctgtgtttttttttttttctactgtgtgcctggaagtgtgcagacaggcacggcatgtccatttcccctgcaggctactggaagagataaggctgggaggcagatcacactttccaccttgagaaagacacagaaaccgagcagaagaatccaaccggggattagggaaagctccctgggggtactggctttggagctgggggaggtgggatagacctctacacagagaggaccgggcacctgtgtgcaggggaggaagctgctccacttggcaagtgcgcagctgtgggaaggggactccaggaaacaaaatccaaactgcaggctgagaagtctgtgaagttctaatcacaggagtagcatggtgaagagagatgtggtgtctcatggctctgaatgggtgtcgggcagatgctccgcaaggcaggaagagccaagctggctgctgctccagcaaaagcagctcatcggccaggtgtggtggctcacacctgtaattccagtgctttgggaggctggggcaggtggatcacttgaggtcaggagttcgagatcagcctggccaacatggtgaaaccctgtctctactgaaaatacaaaaactagctgggcatggttgcacacccctgtagtcccagctattcaggtggctgggaggcagaggttgcaatgagccaagatcacaccactacactccagcccgggctacagagtatggctctgtctcaaaaaaaatgatagcagctcatcgaatggagacttgcagccctggcatcttgaaagcccctttgcaggtcgcatgaatgtctaggcatctgtgcttggtcaatgtattcattttctgggggtgccatgacagattaccacacaccggatggcccaaaaccatccttttgcagttctggaagccaaaagtccaaaatccgtgtgtcagcagggctgtgctccctctgaaagctccacaggggcatcttggccagcttcttccagcttctgatggctccagggattcttagcttgtgatagtagaattccagcctctgtctccatcttctcctgaacgtctcctccatgtctgtgatctcttttcttctttaaagacacttgttgttaggtttagggcccacccagatcatccaggtgatctcaccttgagatcattaacttaattccatccacaaagaccctttttccaaataagtttacattcacatgttttttactggatttgtcttttgtggggcgggggttggagggagtcatcaccattcaacaccctctagtctataaggtctattccctgccctgctactaagtgggagttcctggagaatagcaattgtgtgttcattccttccttccttcattccttcattcttgtgtcccacagatattgatgtaatgcctaccgtgttccagacacgctgcgaggccctggggatgcagccacaatcccaacagatctgatgcctgctctcatggaactgactttgcactggggggaggccaactccacgaaaacagaaactggatgacacattggagggagagcagtaaaaggagcaagcagagagcaagaacaacagtgttgccatggggcgggtgggcccgctgtagccagggagggcctctccgaaggtataacaggtaagctgagccctggatgctgagaaggaccagcctcaggagcagggcccctctgcagcaatgcctagtacagaggcttagagaagacatgggcacgtgcaccaggcatcccatgggcagggctacctgagttccatatgtgtgtggagaggtcccgcagggcctgggtgcgtgacgaggatgaataaagtgggtggagggtaatgccacagtgaggggcagatggtggccagttgacaacacgtgcccccatcaaagaggtggttgctactcagctctgactcatggtcaccaaaaaggatgtggggcgagtgtggccagatcatctagttcttcaaaagaaagtagaaatctaaacattttttttttggtaaagacatctgaatttcaagtgcttttattaaaagaagcaaaaagaggcctggcacggtggctcacgtctgtaatcccagcactttgggaggctgaggtagacagatcacttgaggttgggagttcgagaccagcctggccaacatggagaaaccccgtctctactgaaaatacaaaaaaaattagctgggcatggtggcaggtgcctgcaatcccagccactcgggaggctgaggagcgagaatcacttgaacccgggaggcagaggttgcagtgagctgagatcacgctactgcactccagcctgggtgacagagcaagaacctgccttaaaagaagaagaaaaaaaaaaaaaaaaacactgggtggatgaaaaaaaaacatccccaagccaggtccagcctgcaggtcaccattttgcagcctttgggtggaaagccggattggactgcagcagcctagtactcaaggagagggcacggcagggagaggagacagcagcggaaaggcctgagctgggacagtcgaagagctgtgagcggcttgctatggctgaaacgtagtttgagtgtgaccacaaaacatggcagactgtgaccacattgcaaggatctcggaggcttggtaaaagggttctcttccccggagatgtggcacagtgtccgatccccgtgcctttcctcatacagtgccctcccccctttctccgcatgtctacgttctgactctagtgccactttttccacagtctccctggtccccctcccacccaccatcaagatgggatctctccctcctgggagcacctactgcactttgctttcattcattcattttttaaaattaattaattaattggtttatttattttgagatggagtctcactctgttgctcaggctggagtgcaacgtcacgatctcggctcactgcaaactccgcctcccgggttcaagcaattctcctgcctcagcctcccaagtacctgggattataggcatgcgtcaccacacccagctcgtttttgtatttttagtagagacggggtttttgccatgttggccaggctgatctcaaactcctgacctcaggtgatctgcctgcctcggcctcccaaagttctggcattataggtgtgagccaccatgcccagcctcattcattcatttatgtgttcatttactcagcaaatattagagtgcctgctctgtgtcatgggggttggaggtggaggactgaggacacagaagtcagcccaagggacacagtgggagcccacgcagagtcctcatcttcaggggactcagagtccagcagtggggagatgggttacatgatcacacaccacatgttaagttacaacttcagtgggttctggaaggagaagtgctgagggggagacgagtaaggccagaagggcttcccagaggaaggggcaagggctgagctctgaggatgcatctgagttatcctaaaggcattggaagcactggacaactcagctttcctccgggaggcaccatgctaatgtgtgcccttggaaagcatcactgtctcaaaggggctggaggaggctgttgtggccatctggtgagagaggacagggactggaccacaggacaggattggagtgtgacccatagatgtggagagacgtggggagagtccagagactcggaggaggcgtggaaaccatggcgtgtccttgcttcaactcccctctgagatggaagctctggatgccagagatggtttccttgctgggtgacccaattcagcaaaaaagaagggtgacctaacggtcagaatcagactgccccaaatcgagcctccaagacttcacttctcagctgtgtgatctgtaaaatgatgacagcaacagcagtaccacttcataggcttgtcctgaggtctcggtgaatgatctctgagctgcggagcacatggtacccactcactaagcaagagccaaacttcacgaaagagtatttacatgttaacaatgtcattcacatgtcagcatgtaaccgccagtgggttcattttgccactgcccagatagaaccaatgtatcaagacgggaattgcaatagagaaaagagtttaattcacgcagagtcggctgaatgggagaccggagtttcattattactcaaatcagtctccctgaaaaattcagagactggggtttttaaaggataatttggtgggcaggggggcagggagtggggaatgctgactggttgggttggagatgaaatcatagggggtcgaagctgtccttttgcactgagttggttcctacatgcaggccacaggaccagatgagccagttgatcaatctgggtgatcccagctgagtgcagggtctgcaaagtccctcaaacagcaatcttagattttataataccagtgttataggagaaattgggaagtttagggatattttggcctctggctgcatgactcctgagcagttaacttctgatcttgtggctcacttgttagttgtacaaaggcagtctggtccccaggcaagaaggaggtttgtttcgggaatgggctgttatcatctttgtttcaaagttaaactataaactaacttcctcccaaagttacctatgcccaggaatgaacaagggcagcttggaggtgagaagcaagatggagtcggttaggtcagatctctttcactgtcacaatttctcattgtcacaatttttgcaagagtgatttcaatcagagcagtgccccaaacatttttttgttaataatttgaaggatgtttattttagaaaacaaaaaggacatcaaggtagccatcacgcaaaactccgaagtgtcttagacttccttactcttactgtacagcattatgttgggtttgaattaattagggggcatggggcatcctgatcgcctcgggatttgtggctttaaaagtctccggagaggactggcagcagttcccagggatgtgtgccattgtctgggacagagcaagccgagttcgttgagctacagcctacggtccagggacctgacttggctggaggctggacatgtcctacttctcttaactcagcaaatggacggaggtcagggaaaggttgactcggggtaggggctggaggaggttgcagggaagcctgtggaagccactcttgcagcaggtcccgggagagccccaggccctggatctgagcatcctcagtggggcttggggatccgtacctctagagggcagtggggctccaccaagagtcccttccagtgtcttcccagtggccaggaaatactcctcaccttagaacgggcctccctgctcagcctaaagggaaatttctacccacaggttgccttggctgggcgcagaggatggatctttccacatccagttgtttgtgcgggggaaagctcattaggaaggaaagtatctagtgtcagtagcatgtgaacgtttccaagcacagaagcccgacagctgtacctacttagggggtacctggggactccgggccacacagaggccatctcccaccagcctggccagggggaagtcagatttctggggctcataatgttcacatggagaaaacgtgcatttctactggagtgttcttggccagactcaggcttttagattccccaaaataaatctcctcgacggttcgcccctgcctgctcctacccctcgttcttgcttggcaaacagggaagtccctggatgcattttggtccagagatcagagcccccagggatcagagcctcatgggctgcaccctctaagggccacagaatccctgttgggggcaaggttagggggtgcaagcatatccactttgggtgcacacagacctgggttcaaatcgtcactctgccactgcacagctgcagggtcaccagcttgcacccactctgagcctccggctcatctgagaaatgaggaaagccccaccttacgggatggccgcagggctcggggacagaaatcctggaaccagtatatatagcacaacaccaggcacatcacagcccctgccagaagcaccaccagccgcaccctccctgctgctaatttttcccgaggcacccattgctgaactcttctgttcttatggtttatacagtctatccttcctgctgggacacaagctccactgccgtgtccaaaacactctgttctaggcacaaggttggcatcaaaaaatacctgttgggtgcataaatgaatgctttggagctcgtattacagttctctgggcctcagtttccccagctgtgcaatgcggatgatggcattagaagtgtcaaaggtggcttcagatggattgagcaaatgtgcaagagcacccagcccaggcaggcaacagatgcaaatccactctcccaatcagattccgaggttgtcttgggctttacaatggagtcaggagaatcgccaccctctggcctccaagtgcagctcagagggatgggtcactggccaggcattgatacagactcacccaacaaggcctgcaagttctctgaacaggcgccctcatgttggatcctcccaggggccaggcagggaagactgaggccaggaaacaccccaaggctcagagaggtggggtcactgggcgaggctgtcttggccgtttctctgcataaagcagccaggggctgtgaaactccaaggtgagaggtggcccatgggtgacaaacgggaaatggaaggccaaagaagtgtgagtgcaccggggaagcagggtgtcttagtgggaagaatgtgggctctgggatcaaggagacctgccttccggcctgcctcagccactcaccatgcaaccccggggaagccatatcacctctcatttcctaatcagtgaaatggagataacaagagcccttgctctgcagagtgctgggaacggctcctgcagcggctggcacacacttgataagcagttaggaaagagcagatattactctttgtatgagttctctcttgttgccataacaaattaccacaaacttaatggcttaaagcaacacaaatttaacatcttacagttccggagggcagaggtcctaaaatcaaaatattggcagggctgccttccttctggaggctctaggggagattctgtttcctgccttttccagctcctggggccatctgttttccttggatcatatcactccgatctctctgtccatcattacatcttctctgacggtcctgcctccattccatagggatccttgtgattccactgggtctacctggataatccaggataatctccctgtctcagagttcttaacatcatcacgcctgcaaaatccctcttgccttatgaggtaacatattcacaggttctggggattagggcggggacctctttggggccataattcagccgaccacactgttcttatgatgcctcccatcctggccctgctccactgttcctccagcaggcactgtctatctctgtctctctcttgctctagccttgacaccaaaggagttatttggttctaatttggggttctggttggatgaattgcaggagaaagcttgtgtctcctcaaacatccccccattgtccccggaccatacaggttgtagtcaagggacttgttagaaggcaggcggcagccaagaattccagagaaagctgcatgggaaatgtccccattcattcatcaaatatcagagcacctaccacatgcctggcacttctggtcactgtgggcacaactgtggactgggcagacttgactctgccctcgaggaactgaccttctcgggggaagacaggtgggagagtgatcctatcataggcactcaacccaaacaagaccccaggtattgcgagggagggtggtggagcagatacattagctagggtggccacggatggcctctttgaggaggtggaacatgacccaaagagccatgcaggggatgggggaagtgcgttccaggcagacggcttggcaagtgcaaaggccccgaggcaggaacgtgtttggcttcttcaagaaacagcaagatggcagcgtggctggagggatgaggtggtctgagagtagctgggggccagatcatagcaggaccctggcttttattctgagtgaggtcagggcctttggcgggctttagcaaaaggtgctatcatctggctcatattgaaaaggatccctctggcttctgtgaagggaacagacgatagcaggccagaaaccaggaacccagaaggaggctacacaggcaaaggagtaaattgaggagagttttaatggattattcacaaaggcacaggagagaggggaaacgtaatgcaagatgaatcccccagagctatcagcactggggcacctctgccgccccaaggcccgaagaggttaaggaggagagcagtttctgggaccgggagggatggcaccccatggagagggccacttggagagacagtggcttttgttgagggacatatccaggccacggcatgaacacccaaccttccatctcttgctggcacctcctattgaaggaaccctctgaaagccagaggtgccccggagaggctggtcatatggtccgcctcccaggcccagagagctgagggtgaacctggagggcaaatggaagacactggaacaagctccctgcccagctccctgaacgcagggcagctgacactgtagcctctgtgcctgtagccaccgttgctgtctagctttagaacttggatccttgaaaaaaatattagggctgctgctccatggcagccctgtgcagaacacaccaggagggagagggagagacacggaagatgtagcgcgccccccgcctccttaggctgttctcccattgctataaagaaatacctgaacctgggtaatttacaaagaaaagaagtttaattggctgatagttccacaggctgtgcaggaagcacagtggcttctgcttctggggaggcctcaggaaacttacaatcgtggtggaaggctagggggaagccagcacatcacatgggcagagcagcaggagcaagagaagggtggggaagtgctacacacttttccatgaccagatctcatgagaactcactatcacgagaacagcaccagtggatccacccccatgatccaatcgcctcccaccaggccccacctccaacactggggattacactttaacgtgagatctgggcagggacatggatccaaaccatattattcccccagctccatctttacagagggtagaggggcaggaggcatgaggggaggggccggagagggactgagaggggcaggagcggcactgagcggcttgcagcagatgagggggtcacacctgtagtggctttgttccgggtgtaggtaacgatgtgttgttactttaagactttttcttggtcatagattgtgtggttacagatttcaagcagtacaaatggatatggagcgaaaagcccctctcgtcccctcccccatgcccctggactcccaggaccattagtaattctgaaatgtctttcagaaaaagcacgtgtgtttgtgtgtgtgtatacagtgtgcaggtatgcagtacgtatgtgtattcagatgtgtgtgtatacagtgtgcatgtatgcagtatgtatgtgtatacagatgtgtgtgtgtatacagtgtgcgtgtatgcagtatgtatgtatatgcagatgtgtatacagcatgtgtatatgcagtatgtgtgtttgcattgtggatgtgtgtgtttgtatgcagtgtgtgtatgcagtatgtgtgtatgcagtgtgaatttatgtcattgtgtgtgtatgagtttatgtcattgtgtgtgtgtgtgtgtgtgtgtgtgtgcgtgtgtgtggtcatcccatgaatgggacgcacaggtctgcactttgcgttttcccttgccggccactgttccaggcactggggtgaaacacagcagtgagcaagacaaactgtccttttttgttttgtttttgtactttttgtaaagatgaggtctcactatgttgcccagactggtctcaaactcctgggctcaagcgatccacctgcctcggtctctcaaagtgctgggattacaggcatgagccacagcgcccggccaagacaaaccatgtagataacaggttagacagagggaaggcccatgaggaaggatgaggccaggagacacaacagagcaacaaaggagctgaccctaaacacaacccgaggaaacagggtgttttcctcactgtactgggttgaatcgtggccccctcaaaagatgtgttcttgtggtggacgctggtacctgtgagtgtggttcaacttggaagaaaggcctctacagatgtcaccacatgaagggtcttggcatgaaaccatcctggattaaccaggtgggtcctaaatccaaaaccaagtatccttataagaagaggagcccatgtgaagatggaggcagagattggagtgatgcagccacagccagggaacaccaggaacccccagaagctgggaggggccaggaagggtcctccccacagccttcagaggcatcacggccctgtagcacttggtttcagaattctggcctcgagaattacgtaaagataaatttctgttgttcaaagtctcccagttgatggcaatttgtaggcggccctaggaaatgaatgcacacacctattctgttccaaagctgcgttggatccccctacgggcgtccgccaggcgtcaggtcaccagggctgtgaggatgggtgttctgattgtttatatttttctgctacttcagtagaccagcctgagtatctgtgtgtgtctttgggtgcgtcgggggtgtttctagaggaagactcgcaggtgttccactgctgaatcatagggtcattcattgttgatcaagatcttgggtggagtctgggcgccgcgattttagcatcgaggaagagggaccattggctgaagccggggaaagtaggtagcatgggtgacctgaaaaccaagagcaaggggacagtttgaagaagtggagagaacacctcagagccaaacgccactggaaagtccaggaagagaagaaatgagaagagtccatttgattcgctgacaagggagggcgctggtggcttggcagtgaggtaggcgcagaagtcccagcacaatggctggggagtgagtgagcaggagcaggggatgagaggcagcagcaactccttctagacccttggctgggaggcgtggggaaagccaggctggtggctggaggcagatgcgggttcgatggatgattttttttctatttttatttctggttgatttagacaagggacacctagcatgtttgaaccttgatggttgggagctgggagagagggagggtgaagataaaagaaagggattaaccagggtgtccacgtgggcagggacggctcctctcgaatcctcggggggacgggggtggtggaggtgggatggagggtggggcagctcttcctcaccggatgaagggtccagctgcggagactctgtgatgtggaaccctctgatcgggcctgtgtgcggcagatgtgtgagcaccagctctgggtggcccaggggtaggccaggccaggtcactggtggctctaaaagctacatgaaaggggtcattacagagctttaaacctaactgtgatggcgacccactggagcctcagaaccattatctggcagctgcgtggagaatgggctggggaggtatggaaaccagttagggggcggacatgctggtccatgtggcccagtggctgccacatgcctgttacgtgtggagtttaccaggcgcccatctgctttgtggcgatgctggtggaaatgcctattataacacagatacagaaaatgctgtggtgtgttttgagataaaaatcacaagcagccgggcgcagtggcttacacctgtaattctagcactttgggaggctgaggtgggcggatcgcctaagaccaaaagcttgagaccagcctggacaacataagacctccatctctatgaaaaattaaaaaattagccaggtgcactgatgtgtgcctgtggtcccaactgctcgggaggctgaggcaggaggatcgcttgagcccaggaggtcaaggctgtagtgagccttcatcattccactgaactccagcctgggtgacagagtgaggccctgtctcaaaaaaactcacaagctctaggagacaaattggacttgaatcttgaccctcccccaacccccgacagactatgtggcctcagcctggttacatgacctctctgtatatgttagttcttcattgctctataacaaatgacctcaaaatatagcagcttaaaacaacacattttcattatctgacagctcccatgggcccggaatctgggttcagcttatctgggcccccaggctcagggtctctctcaggctgcagtcaggagtcatcgggggccatggtcatcccaaggctccgctggggcaggatccacttccaagcaagatcagcagttgtggctggattcagttcctcataggctgggaccgaaggcctcagttccccactgtttgtgaccaggagctgccctgggttctttccacgtaggcagtgctgctggcttcatcagagggagcaaatgagaagactcagataaagagagcgccagcaagatggaagtcattacctcttgtaatctaagaagcgagtcactaggtccagcccacaatcaagggtaggggatcacacaagggtgtggctaccaggagtccaagctacttggaaggctgaggtgggaggattgcttgagcccaaaagacagaggtcacagtgagctgtcattgttccactgccctccagcctggatgacagagtaagaccctgtctcaaaaaaaaaaaaaagaaaaagaaaaaaagccagtacctagtgataataaaaatcagagcaattgttgaaatactgttttaaaattctctgtagatagtgcaacccctgagtgccagcaccaggtggatcattcctaccaccccctcccctcatcgggatgccaccaagatgcagctgaaggacatttaccaacagatgcactcaggccttcagagattgtgttagacatcttagtccatttgtcttgctacacaggaatacttcaggctggcaatttagaaagagaagaggttgatttggctcatggttctgatggttggaaaattcaagatggggcatctgcctctggtgagggcctcaagctgcttccgctcatggtggaagaggcaggggacctcatgtgtgcaggtcacctggcgagagaggaagcgagagaggggaggtgccgggctccttttaacagccagctctcatgggaacaaatgaagcgaaaaatcacttacccccaccccccaccagggagggcattcacctactcatgagggatccaccccataacccaaacgcttctgttaagccccacctccaacactggggatggaatttcaacatgagatatggcagcggttgtgaggggagggcgatcagataaaccaaactatagcagcttctgtttgggtccaagtagccatggagaatacagtgggcctgattttaggatgggagcttaggcagtgtctctgctgacatctggagctattacatctaatggaagagatgccaggtggaagcaacagctggacgaaggccctgagatgcaggcagtgtggcatgtttgagagtgagagatcagggggctggagcagagggcaagatgggagagtactgggaggtgaggtaggaagggaggtgggcagtggaaagctttggtggccatttaaggtctttgtctttcacactgaggatcttgagcagaggaaggacctgatctaagattagcaggaacactctgtgatgaggacaggcagaaggggaaaggcagggagaccagccgagagattaccacatcagtcctagcaggaggtggtgctgaaacaaacaccagactcagaagagtgccaggccgagatggggtcagtttcgggataaaattgaaagagggaactgatgggatttcctgacagatcggagatgggtgtcagagaaggaagagggccaagcatggtgctggacttctagcctgagtgaccggggtgacggtgtcccatgaaatgaaataaacgctggggtgggacggtgctaggaaggagaaatgcaagagttcaggttgaaacatgatcagctccaggtctctttgaggcctttctccctccctctgcaccctgctgggatgtccacttcacgcggatggagactttgcttagtctgtgttcttcactgatgtggtccgtgagccttgaacaacgtattcatccgttttctgttgcttataacagaatacctgaaactgggcattttgaaagggaatttctttctcgttgtagagactgagaagtcccaggccgagggccacatctgatgagcgccttcttgctcacgggtactctgcagcatcccctggtggcacaggacatcgcatggggacgggctgagtgcgctaatgtgctgtgctcaggtctttcttcctcttcttgtaaagccgccagtttccttcccatgataacccattcacccattaatccatgaatggattcatccattcacgagggtagagccctcaggatccagagtcaccacttaaaggcatcacctctgaacactgccacattggcatggcaggcaggataagggccccgtaatgatgtccatgttctaatgcccatcatctgtggatgtgttaccttctacagcaaaagggactttgcaggtgcgattgctaatcaccagtgattagaaaggaagagtaccctgggttacccaggtttgccccatgtaatcacaggagtctttagaggcaaaagaaagagatgtgagagtttgttagagaaagaggcgtgaggctggaagtggaatcagagtgatgggatggctggcccagcagatgagagctgagtgctaaggaatgcgggcagccgtgtctatttccaaagaagctggaaaggatgaggaaaccttctcccccagagcccccagaaggagcgcagccctcctgacaccaggatgctagccccacgggacctactttggaccttggacctccagcactgtgaggtgatgaatttgtgttgctttatgccactaagtttgtgctaattgtcgcagaggcctgcaaggagacagggctcaggagcggtgggtttcagctaggatgaaaacacgcaggccctggggggagggaagactgaggatgtgggggtttgtttatggggggcagtgaggtgcagagggatgggcagcaccatttcatggggctgtggggcagaaagtggggtctgagcctcatgggggtcagagtgagacgcaggggatgagatgagagtgacataaacagggataaatggcaaaagagactcgtcccagaggggaggccgtgagccctgggagatggaagtcacgggacctgggacccccactgcccgactctccgaggagccctggacatactctgggcagtgctggtctagggaactggagacggggggtggggtgtccacagggcagattttaggagagcctgcccttgcaccttcagatcctggagcccagctcaggggccaaggtctgtgtcgaagaccccagcagcacacagagggtgccctggcttatttgcaccacggggaggataaatgagaacgtgggctcctgaactgcacggctgcaggtgtatctggggaggaccagatggagaggcgcccagccggagcgcgttagcaccatctaacatagcaagctacaggcgctggccgcacctcgctccactgcaaacaatccgttattcaccttgtcaaacagactcccccgagaagccggtttcagattgggcttgtaaacggcagctggctggccggcccttctcttacctgtccccaaggagctgttgagccacagcagtgagcattttacaagcaggagggccacaggtgactgcaggctgccagaaagcagataactggcctggcaggctccaggattctagggaattatggcctttggctttctgtagcaaagggaactggctctgtctagaagacaggctggaatacactgctgtgtaattagagatgaataaaccgagccatgtggggcaggaggaaagtctcccttgagtcagttgtttggtttataaaatgtgttaaatattaggaaatgattaattttccatacatgccagatgagcccattgttctccatgcacaggaaaaggcatgtttgctcatttaacacccggttcctgggggcctaccataccgcatgccagggtggtagagagatggcattgagcaaatcaagacaatcgtcgccgccatggaatttacaggggcaagagacaggcagcaaacatgcacacggccatccaaacagcgtttttgacatgccaggctgagtgcatgtgtgggtggggcatggggtaggtcccacatgacagcggtcactgaagtcctctgaggacaagaatttgattggaaaattgaagaatgaggaagagccagtccacgaaactcgggggtcaaagcgtttcaagttttaggaggagacagagagagaggtggggaatggtgtggtctgggcaaggaacagaaaagagacctggaggctggagaacttggggccgaggaagatggctgagcctcttgcctgaaattcggatcatcctgaacgcaaagggaagccgtggagggctttaaacagggctgtgatgggatctgaggctgctttaacctcgatctggctgctgtgtggacggggaggtcgggagtacaccagcaaagggctgttgtgtcatccaggtaggagatgagggtgttctggtgagcatgaggcatagaggtgggatgatttcagaagggacccagcaggacttgctgatatgtgggcagtggggacagtgaaggatccggggttattcccagggttttgactaagcgactgtgtagatggtgttgccataaactgatgagtaagatgggtgtgtgttgggagaagggaggaagaggagattgggaatcaggaaattttggggcatgttgaactcaaaatgcctcctggctaccaaagagaagaaggcacatagttggggaggtcatacaggagtctggcacgtgtgtatgtgaaggtgtaaatacaaccctctccacggttgtcctgtgaatgcttttttctcatggtattaagggcagagggttctgaatcaaatatcctctgacactttgcacagcagcagaaactgttggcaacgtgttttcaaggagttttgtcagtatttcatagaaggatgaagtgtccccatttcaacaaaaaatttagggatcactgatgtaaaaagtatagcccctggaaatcagagtgaattgtcactgtacttcctgtctcgagtccagcgcaatgtttcagagcttgaagtttttcgtaaatcagggattcctagagggcctgggacacggcagatatacagcagggggttttgtttctttgataactcctcatcgggccatttacaaagctcaacttctgaattttaccaggagggcagggcaagaggtggtttagagtgagaagccctttttggagaaagtttggtctgaccttgtccatctttgtaccacaaaatgtcatgaggtttatagcaagtgtgtcccctataccccatcacagctactggggatccacagacaaaagaaatgacttcactttcatttcttaaaggtccttgtggttctgtgcctctgtcctcagcgttattttatactcaacctggtcctaccaggaacccagtttcctcccaatgtatgaacatgaagaggctgagtaggagtcagcatttgttttctcctgtcaatcttaccacttcttaaatcccaacttggcacgaaaccactgttctgtttctgctcctttgtacgaaactaccccatgctgttggatacagcaaggaacaatgttcagatttgcaaactcctggcaaagtgaccccaagatgctccaatacgaacttccttgttatctcaggttttgaaaattggataaactcaagtttctggctttaatgatctatttagaaaaatttaaatcccatagtcagagctctaaatgttttcttccagatattagtcaaatgaggtctcaagatgagctcaaggctccatgatatgccttaggtgaatctgaaatctgtttgttaaatgacgggacagtggatcgataggtaatattgattaaacatgcagcacctgtgaggtggggactagagaactcattttatatctggggaaactgaggcacaggccaaatttgtgtttattaagtgtggcttaaatataaatgtagaacacagacttgttttttgttttttgttttttcttttttaaaaatgactgtatagttttagccttgtcctctgcttaagtgattttgactttcgattcaggagaagtggtgtaaggttttcagaaagtgagttaaagcaaaacagttggccgcagcggcagcaatcatcttagtggggcacagttgcctcttaggtgtagccctgggcagatattttttgtggggctcctgtctgcatgtgcaatttgagccattcctaaatcagcaccattctggtgattcagtctcacaccatcccacaaaaatcacaatgaaaatactgcaccagccatcaggagcaatctgctcaccagggtgctcttctggaagctggcctggaccctgtaggtgcaggttctagagctctttggggcatctgaaggggagaaatgggagccagctagtcccagccaccagagggagactaaggctatttcaagatagacacttccagcagccaggacccatgcaggtccctgtctgagcttgggacccctgcccatttggtagtgctggttacacgcactggaatggggggctagaaaattcccaggaagacattccaagtgcagggctatggtggggtgaagtgggtccctaaaacacagggccgggggcaggtatcccgtttccctggggttaaagggtgggaggaggttcgaaccatattaagacattaaaaatagcagctacttccaaacctcttaggtgctttagctacaggagggcaaaagctgttttaaggaggaacttggctagaaggttctagtacttatgtttgtgggtttgaaggtataaggtgcattttttttctttagccttgatattttgcaagatgctcaaataaaaatgatggcttttgccttccaagtggctggcttagcccagttgaccatgaatgctttgggacccttggaaagctggtctaaggtgggcatcataaatctcttttatgaatgctacctcaaaagtagtctaaaggcacagattacagcagagctgtgctggagagaaccagacaaattcaggttgaccatgtggctttgtcacctccggcaagtggcttctgagcctgagtcacaagcacggtgggactgtacctacctcctagggctgagacgaggagtaaatgcacacacttatgtacacacacaaaatgttccttgctgagggagcccgaaatgtaaagggaatatttgagtagcctctctggaaaagaaagatacaccaaagtagatgttgcttccaactgttttattgctaaactatcatgatacaagccgtataaaaatactttacatataggaaaaataaactacattaaactggagattaaaaacatttgcataggaatgtgatgtattcaaacgcctttaacagtcaggattttctaaacctaagcctgccagcaccaccatgttggagagacctgtttgttggagaattggttttctctcctctgagggctgtagaggccagaggggtgagtgaggttctttgacaagatgtccaggatgctaagcttgtcccaacagccatagcctcggtctgctcaggccaatcagaatgctgtgagcacctgctctaatggaaacaacatcatttgcatccattccattcaaagcttgaactcagcagggagtttattctggtcagccaacagctgcataaaggtagaatgttaataaccctttcacttccagctcccaggaccctgatggctcagggagcaactctctgttatcaaccaccagaaaagtttgtttttaaacagactgagttaaacagtgatgttggctgtaagtcaaggcactcacaaaagctgagggaaatggatgtttatgatcacaattttataggatgctgctttttcttaagcatttaattggaatgcaggaaaatacttgctatgcaattggctgctttggttccacgaaacgtaatgccctagcctcgagcctaggagacccaaggttaagatgcgctgggtcaccgagcaccttgcctccgggaaacaagttcgggaaaggttagcccagcttgtcaagaacgtcacaactccatccatgcctcttgtaaacttgaaatgaaaacattctttcaattctgagcaatagaaagcacttggaaaggtctttttttttttttttttttgacatgataaattcagcctcactgtagtccagagtgagaattagaacataccaacttccaatctgcctaaatgtgacagcctctgcccaagactggctcactgaggcgtcttggctactggatgtaaacaaaaaatgcaatatccgtgcctcccagttctttgaaggaatcaattcatccttggttatatctatgctggaaaactgtgggtgtcctttggataaagcatacaggagttatctaccaggatttagatttggtcccttctgtaaatattagcctgaacgttgagttctgtgaacatgaattcttttcgaattccattacaatgcaggcagggttttggtgtcaattttttaaaatcaaaatcacctactaaattagttattttggggggaggatctagacacttgatgattctcagtgaccagatccaggctcagggctgaagtcagcataattcttgagcaagaaaaaggtgattccttcttccacaaagccattccttctcctgagatgccatcttctagagaggtgactaacaggctctgagtgggggttttattatatgggtttttgtttcctggaatgagtaacaaatgtttcaagaatacatcatttctcttaagaaaaaaaaatcaacctatgtgtaaaaagagacacttaaaaagatttctgaccatttataaatataaatctaattccaacaggggtgtaatattttgaggacaggtaaaaagcataaaaatacaggtaagaaaataaaatttaataacatactaatctggattgctatacatattatcaagcagcagcatctttgtacaatacaggaagacttgcaaactttggaaatatactacattcagcaacacggtagacctgtcagagtgctacatatttacattaacttagatgtagcagtgcaaaccttcactcaactgagatccttctaacacacgtgcaacacacccatctttaccatttagacacccctactttctcattctcttagaggatcttattgcctcttcccgtactggaaatatttcatgagccatccttcttggcaaaatttcctcctagcatttgtaactgacaaaacttccttgatagctgtcagttcctaatacactttctcttgcctgtttatgtctcaaatctaatgcttttgtttctctttcctttgcgatttgttacagttgtttatgaaagtgcttcctataatatccagctaagatgtcttagaaaaacagaggggtttatttgtgtgtgtattacacacacacacgcgtacaggaggttgagctaccaggaggccgtttttgctaacatagttagaaaactgatggaaaatgcattagtcctttttcaccctgtggacaaggaagctgagctactttgctacaatagcaggaaggcacttgggtaaaacattcagataactgaggaaagcccaaattccctcatgtacaaaaaacagctcctagccagtcctagccaggtcgagtgagaacaaatcactcaccacacactcttggcttttccccagtgaagtcaatattgctggagagaaaattctttaggtgaagctgctagtataaggaacttataataaggaacttattttgttcatgaggaagtatttagcatcccagaagttccatggtaggggtcaacctcttactggcattctgtttatttaaaagagaattttgctaaactctttgagcttagggtgggtgagggaaaggtcgttcattgtcagggaaaaataaatgctaggtatcgaccgacaggttgcatacaagtgcacaggcccgaatctgagcattttgccttctatctggagtgccaaacacacctggccccactcccaggaagcttttacctctgggtaaccttgacgggagagccaggacttacaaagcccacagtgggcactgagtggccatgactttcttctgaggccttctgcctacagactgtacagactggactgagaaaacactctaagtacagtctgagtgctaagaatattttcactttgctgcggattattgaggaaacaactgaatggctgaaaaatgaatcccccgcttgtcctggggtatctgcagtacatgcaaacagaaacaaacacatctgccaagaacttcaagggttttgtttgtaaaaatcacaaaaatcacacccacagaggaagactaggggagactgggtgcgctcagtggaaacagttgggaggaaggaaatcacatataacatgcaaccgaatagagctcattcaaagtaaaggatgcattcgagtagatttcttcatgttagaatttgagtgcggataggtcttcaggggcagaagggatctttaaataggttcaggtcaaattaaccagtgaagctgggaagcacatcctgagctcggctgtcccacttagagggaattcagcccttttcctctatcttggtagaaacccacctccagaagcacttgggctgttttacttaacaaaaatacccacacttcttttcttggttgctttagcccttctgctattcctcaattaaatgcacatgcttgagattctccaccgctttacggaaaagcactctggctgctaggaagaaagcaagccggaaccttgcaaagcatccaggttgtacagctgcagcagacaggtgcttgctctctgcagcctgggtcagccccccaagtctatggaaattgtgttagcaggactgcgtgctgcaggggttaaagaacagctcgccaagacagctccagggctaggtgccctggtcagccttttaaagcagaaaaaataataataacaaacgcgtatacatgtcataacttaacgccaagaagtcttaacaggtgatcttgtctgggcaagacagtttggttttggaatgagaattcaaaaataaagctttagctgtggcccagttgtggcatggactgggcgagctctaaggactgacagttcagtttctgtctctatcgagggttttgggtttcttcagcctgtaagctgggctcttgggtcacgttcctttggttgctctgagaactccttgccttcaaaaggtacaggagctgtatctgtgacctggaaaaacgaacgcaagggctggggtttaatcacagtgcccacatcttctgtcccccgtccatccccccaagctccagtcactctgttctcaggagagttccagtgtcctgtctcatgtagaatgtgcttttggtcagcaggtgcttactatttggacggaacaccattaagatcaaccaggatgctctctgggatttaaaacataaaccgaaaagaagagttctctctggtgtttagagggaggtggcgagctccttaagtgagagtccgcttagtgcccatacattgatccgcgtgtggactccgggctgggagatgaacatgaaaggagacagaaggtgaggggctgtggagggctccgaggggtcagatacagaaggtgtcttgctataatggcttcttttacgtctgatttctggcaggaggtcctgaaaactccttcctgataatttcattaactacaaaagaaaagaggagggggggggagagagaatggggcaagtgagagggcaccgaaaacatgcatcaggttcactttctagaacctctattgggctattgatttttgagacaaggtcttgctctgtcacccaggctggagtgcaatggcatgatcatggctccttgcagcctcagcctcccgagtagctgggactacatacaggtgcacgccaccacacctgactacatttttaaatttttagtagggacagggtctcactctgttgcccaggctggtctcaaactcctgagctcaggcgatcctcccacctgagcctcccaaagtgttgggattacaggcatgaaccattctgcccatctctattttttttaaatactttttttgttgttgttccttgtgcttgtatatttgacaatttttaatataaggaatgctttcctatatcatattttcttcaggcaatattttttgctaaagatctgttagtgaaaattgctcaaatggtaactttttcaaatctttgtggcagaaatggaaatctttgtgggaaaaatggatttgagccatagggcatgtttgaagtaactttctcctcttctgcatttgatgtcatgcttgaggctattgtgtaccaaactacttccactatttccacatctagaaaatgcctattacatgattaagtctgataaaacatggttctttcttgatccataaaacttacggttctcaaaagaggaacccttacaaagagagcaagtgagggccccccaaagactgactagccatcaacataaacatagtttccatttcagcacaaccagttgaaggatcatgtgccagctcaggaaagtttggtcacccctctccccagaagtatgtgtggagttcctagcagggaaccaagagcagtaacagtcactggcatcaggaagcaagctaccttctcccactttgcccactgggtaaggtactaattactagaattagggcactgagatcttaggatagtggatcctgcaaaaaggttccctaaaacattcttggaaagaagaaggtgctattggtgacagcccatccatgaggcatgctccctaaggtatgtctacaccttcagttttacaggtagaccatactgactagtcgtggggtggaaggcatgaggctgtagacccctttgggagtcccatcaaaggcaggttcatttcccatttcctggttctgacactgaattcttcccacacctcctcatacttccttttctcaccttagccttaagttacattggcagtgagggttaaatgttcagagttgcccgaagtttctccatggtcaaagctgggcccttctaggttcagggtgcttttcgctggaaaacccctgcccagatggtttgcaacctccataacagagtcggggaatgcaaagagctgaatgaaccgggtttgattctcagctcgttctctgactgtatgatgttacctctccgtgcctcaattttctcatctgtaaagtgggaatcatagcacataccttttcaggctgttgtgaggatgctaagcattcacataggtaacagtgcccagcacagtgcctggtgttcaatagctggtggttatgatggttagtaaaatccccatgcttcatgttggactctgaattccgtgctttgcaaacattggctttgttttgtgccagaacatcaggcatgccacaagcatgtacatgagaggtcggattctggagccagcggggttagatttccacctctgccacttccttgcttggtgaaccttgccttggtgacaaaaccactctgtgcctcagtttcctcatctgtaaattgcatctaaaaatattacctcccaggttgctgaggtgcttggatgagataatgcaagtaaagatcacagtgcccagcgttcagccagtattggtttgtagaccagtatatatgtattagatatgtattagaaatacatacattatgtataacttaacttttccaacatgtggaaacggattcattaataggaatgtagaggacaaattcatatatttagctaaccagcactagttgggcatctactgtgtactgggtaacagctgactcccaggggccctaaaccagaagctgaataaggactgtcagcccagaccctcagtgctccctgcaggggtgataagctgaccatgctgtgtaggacttatgtagcgaaagccaaatgcccggggcaggtggggtcggggcagcttcatgtgaagcttttcaaagcccggattccaaagggcttcctgttttctcaacctaggaagtgagaggaggggatccttaatgaaaactttccacagcctcagctttctaaaattagctggtaggcagagacgctggcaccaaggccctctcgaagggctgtttcccttctcagaacacagggctggggcaggggatgggaagtagggaaacttttcaaacaggcagaagcatgtttccctcttcttggatggaaatggtcctgctgatggaaatggtcctgctttctgggagttactttcagatagaagtgaagagttgcatctggaaaattcagtgaccctatgcacttagaccttcttgctattgggggtggtgaagtggccctgagttcaactgccgcccaaacctctctgggtaggaacctcctctttctgaaatgtcggcacttgttcccctgactgccaacaaggagaaagttctagaacagaaatgccggctaggtggtggtgacagagtagagccacactgggctttaagttctgagaggggggtctctgctcaaccacttcatgcagggtccacaggtcccacatttgcagactcgagtaccagggtgcaggggaaccccagtgccctttcaccatgccatttctcctggtctctgtctgtcccccctcagcactgttccctcctcttgtctcaccttcctcacgctgctcctctgggtagcatcatgttttccccagtctaacacttttccttttcgctcatgttacccaaggctcaaacagcctccttggcaaagccccccttggtggccacccccagcccagtcgcactcctgtctcctcactatcccctgctgcgctgatgctctccttccccccatatcccttagatgatgccttggtgcatgggaagtactcaataacatttatttatgaacagaacacagaagcttagaaagggattgggaaacttcaggtcacagtcaggattgtcctccccaagtcggcctctgaggtttgggtgctgaaccactctcctgtattattgccatcaacattttattcctccaataatctaccctaggccagcaactgtacctctcctcctacctgttcccaaatggggccacgtgcagtgttctgcctcttcctggaagccgccccacattcctgccatggtgccctcactcgctccaaaagcaagtactaaatttccaagtagccccactcgtgcatggcaccatgcacacagcaggtgcttaatgcctgcattagcccaccccaaagaccctgcaccatcagtctaggtcccttggtttaaggaagctgattttcatgcgattgacaaatgggttgctgatctgttacttgtttggagtctttctctctatgaaagaatacgagccattcacatttcctgagagctgtgtgccaggccctatacagtgccagggactattatttaattctcacactgctcctaggtaacgtcatcatccccattttatagatggggaaatagagacaggcagaccaatactctccctagcaggtgacaggggattgggatttgaactcagagcctatttaattaacttgtatggtattgatcctttaattaacttgtacggtattgatcctctttcttttggggatcccagaatcctctgtgtcatttgcgtgaagtcaggggacggctatggcagactctgcttagccagcagagagaggccgtgtgacaaaggcaagtgctctgctggagaaagtgtccctttctcagaacacaattgaggccagcagttgtgagtctgccatggtgctcttggcctgtgctcatccttagacagaggtgccctaaaagactgatggagaatgatctcacagaggtgccctaaaagactgatggagaatgatctcagggtgactactaagcctgcaactggaaaggaaaaagtgaaccgatcttatgtaaaaattacgcacaaaacatgctgtaacattttcagtatatatgacaaagtcatttatatataaagaggtgtttcaactcagtaagaaggatattaatattctaataaaaatggctatagacacaaaatgatgatataccaggggtcaacaaacttctcctggaaagggccaggtaatattttcagctttgtgggctctttctcactaagcactgccagtgtagcataaaagctgccatagacagtacgcaaatgggcacagatgtgttccaataaaacttcatttgccaaaacaggctgggggccaggattgacccaagagctgtagtttgtcagctcctagtatgtatatatatatatatatatatatatatatatatatatatatatatatatatatataagctaatggcaaagaagaaaaagcagggtgttctctttgcctgctttttgagggtggcaatctggggaagccagtgcctcttactggatttctaaaagctaaaactgacttctgttagtatcccattctgcactaggaattttctgttttgctaaaaggcccagacacctgcatgtactttctcctccttcctttatcagagctcagaggttcccaaacttcagtttgcagcaggatggctgctcaggattacatggggaaaacaacccagaggtattaatacttcaggtgcaatttaaaggactttcaagggtgaatttcactcactctaggccctttccctttgactgctgactttggaactgaatcccctgagaaagcagcaacaggaaggaacggataggctgggtcctgcttctcgctcaaacctcaagcatgttttccaaaatctggtgagaccacgtgagtgcccacgagagcctgggcccagccacaaaggccatggccagaaagacactcctcaagcttggatgggaatcaagagggctgcattctccaggccaaatcaaagaatctgagagccaagagggggcccaaggcaccaccccccagtcactactgactatttcctctgccttgcagtgccttgctgaattcactcccacgacccctccatgcttgggtcaggatgcatgaacctgaaagcacatgaagtcctctctgggatcttctgcctttggtcctaactgttctcagggggaagcgactctgaaggccaagaggtaagtttcctaagcaaccgggcctgctggtcttgagccctcccctgtgcctttttttttgagtctccctccgtcacacaggctggagtgcagtggcgccatctcggctcatctccgcctccaggttcaagcgattctcctgcctcaacctcctaagggaacctgccaccatggcccggctaatttttgtatttttagtagtgacggggtttcaccatgttggccaggctggtctcgaactcctgaccttgcctcggcctcccaaagtgctgggattacaggcgtgagccaccatgcccagcccttcccctctgacttcttctgtctcaaaactgaaaaggcctgttacttgaaacagagctctcccagacctctgctttacacttactaagtaacttcccagtgttcatcttctccagggaaacctggccgtacttgagtgaggctcagtgaaaagaacataaaaccctcaataggaccctcaataggactgtagcccagagctgtgggtggggtctgaagagtgatggtggaacagcagtaaatcccctcccaggccacgctggtcagagtcagccacaggcctgagccgctggcttgccaaagtccccaagcccaagacacacattaaaaaggcatcgcccttcgacaagttccctggggggcttacaacctcagcactgatattttacttgcatttttatcctcggatgcaaagtcctgaggacactcctgagggactccccaggagccgattcctcagatgcaaaaagtcctgaggagggacagtggcagatggctggagaatgtgctcctccccccagggcttccttctgccatagggaagtaggggttcatctcagcaggccccatcctctggcaatcatgcttctcaagcgtcagctcccctgggtgtactaatataaactctaagatgggctgggcactgtgtgtgctggtttattccgattagaatatggagaagattaaataacagcaacagcatctaagaagctgaggcacagagaggtaatgcaaccttccttcctcaatgtctcatctggacttcacaccccagggcctcctgaaacctgcacgataaggtcttcttagcggccaggctcctctgtggaggcccatcgaggtggatctgctgggtgaggggctcagccgagcaccctgggaaactcagttccaaggggctgatttcaaatccagaaaccaagtagcagaatcctgcgacttcaaaagccacaacaaggaagccccccgggaggagctgaaaccttgagtggagggaatcaggattggaaatgacctaagcacagggcggggcttcctcagtggcttcttaggtaggttttcggacctccctgcccactctgctgttccccagtgccggacacccaccacggatggagagcctcatttaactggacacccacaacaaagtgtgcaaaaccaaaaaggagcaggctccaaagacgttgctgcatttttccacgcaggccagccctggaatcggggagcatgcaagttaatggggcctcatccccccttctcccgcccaaccctgagattctcagggaggtccccaggagtgtccacttcaggagtggaggggtctagcccttaagagcaggagaatgagaagagagggccttcagcctgtcaagttttcttatactttacttaaaaaaaaaaaaattcaagttaaggaaacacacagctggaaaacaaaaggagaagcagaagatatcgattacctttaactttgatttctcggatcaaagatcacagtcattctgtttcataatatgttttgtatccagctaaggtgtgtgtctatcagctctgaaaaagatttgcaaaatcatttttgagaagaaaaaaaaaaatcacctttgatctctcttacgcttccaactcatgccgatatcatccaagcccaggagggaacttaaccctttggctctagtttaagccagaattctgcaacatcttagcatttgtgccagaattaacccaacactagggtaataatcatggagatgagggactctgtgcaaagtgcattacattatgtggggtgtgggatcaggggagcgtgttcagggtggacaaaagggctgctgtgggtatgtgatggggtttcaaatcatggccaactacaaagagaaaattaagctggtttctgctgcagtcaaaggaaaatcagaatttcattaaagatctactcaactgttatcttccttcaggcatctacagatactaaactgggccccagtttccttcttactagtgatatcacctcagtggtcagggaaattcataaaactgcacattttcttcctgttttttgtcaacaatggaaaaaaaagctcctgccctatcagaacaacgaaggcacttgaatgagacctggggagtctattgtaaataatactcctctctacatgtgtacaatgcctgtggctttcaaaacacctgtcttcccaatcccctttggccgaattggaatacccaagtccattccaaatgcctgatttagaaatgttttctgagtccaatttcttacagggaataatgcagcgttattagaaatgtcaagtaaactaggatgctttttcaaatagaggcataagctccctgaaatctcatcttcaagggagacagaatgctcaataaatgagatcctttcagcgcttatgcagttagaggcctggatttcccaatgttgggctccaacaggaattggctagttggggttggctactgctgccctggggcaaaagaagcacttcatctctcctccttttctgaccatgcatctcaggccatctcccaaagcaaacatttccaggtggatgtggccctaaggcagctcccacactaaactgcccagtctccacttgaaactgacttcttccaagtccaagagcagacagtactgtcggataattcactcagggccttaaaataccacctctatcctgacgatggccacattaatgtttttaacccagaccatcactcctgaatttcagattgcaatatctacctgcccaaacttcacagggccaaaaccaatctctggatcctcacccctcctccccgtgtctcacctgttcccatgatgggaaacacacattctctctttccagttgttcaggccaacctgtgtgttccctgactccttgttcacagcccacatcccacccacccatacatgcttctggatttaccccaggtagccagaaaccaacaacctccactgccaccccggccctacagcaaggtgatcctgttggaactgatgttagagcacgccactccctgttttgctcagctgacagctctaaagttctgtaatgaccaacacgttgtcactttatccatatctactcatttaaggagcacttcagtggatctcaggcatcaggcacaggtctgaagtcacacccttggaggagtcgttcgaatctagttggaaccccagggaccaggttcttcagaccatccacccagaacacgagttctctctccaaaccttcaaacaccaaaccacatggtgcccagtgttaatatggggggtgggggggcacaatggcgctatctcaggggactcgagaaaccaagccctgttctgtcaccttctcagagaaatagaaagcatcacatgatggctccgtctgcagcattcggaggtgcagcttcctgtttagtcatagagtttcactctttgtcagcttctttgtggaagacagaggcagggcctgtcttcattcaactgaggcccgaaatcaactcgggaccaggccaccgccaaacaccctcctccgcaggtggctactcgctctgccttccttcatcctcacagacatctccgggggtggtggtgagagttccatttctcaggtcaagttagtaaggcagagaaagatggggcgacttgtccaggaacagcctcctagcattgggtagagaccagatgtggccccagctctatgggtactagtcctgggctagggtttccccaatttgaaagatcttctggctgccctggggcctctgttaaaatgtagactcacatcagaagctgttggaacataagcacttcaacagtgcctctgcctcagtctccccagccacgagatggggatgagaacacttccttggcaaagtcactgaggattaaatgagatgctataggccaggcacagtggctcatgcctgtaatcccagaacgttgggaggccgaagtgggtggatcacttgaggtcaggagtttaagaccagcccggccaatatggtgaaaccccgtctctactaaaaatacaaaaattagctgggtgtgacggcaggtgcctgtaacctcagctacctgggaggcggaggttgcagtgagctgagatggtgccactgtaccccaacctaggcaacagagcaagactgtctcaaaaaaataaaaataaatgagatgctatagctggctcattggcatgtgtttattaagcccacaatatggtcccctaaagaagatggaagagaaagagacaaagaccagtctaaaagaggccattccaataaccaaggataccattctgtttccctacatatttaaatgggaggtaagtccattgatccacgtgaatgtgctggtcagttgtcagtaatatggagatgcggacgtcaagagaaaaggcagtatttagacttactacatggtccctaagtgtcatctacaaatcctcccaaagacacaggggtacctcaaaaaccacaattacttttgcgccaacctaatacaaggttacagcctaagacctatacagtggccttgcatttttaccccaggcataaactggtgagtcatcccactgatcctatggactaggtgataatttaagatgtaaattagaagtggttcactgatgagcttaatcaatggtgataattttcataaaaacacaaggtgtcaacaaatagccattacagacaaaagtacagacccaagaatctgtctccttgacaaatatacaactagcttcccagacttctgagctcacaggcatgcacgtttgaatgggatggaatttaagggaaaccctgcgtgcatctccgtggtggaaccaatgggaatcaggcactggtctaagggacgtccagttttgtgtttctacaatgcaagtcagatgtcccctcctagccagtgtagaatatgctaccatcatctccattgtctgcttttttgcaatgattgcacatcaacttacaatctacggagaaacaattggtgactttctcaactaagctgcccgacaaggaaggactaaccaactgtgtaaactcagacctgaactgcccatttctattctccaattcagcagaatttcttctgattacatgcaactaagctgcacctctcctatcaagcaaccacacggcttctaaagtagcaaccacaggcaggaaagcattctaaacaaaccacagtttacttccttgtccttcagccagttcatcaccacctcggccccaaccctctgctaagaaacatcagccaacagcacaagccctgcaaaataacttgctgcctttggaaaaaaaaaaaggcaaaagaaaagcacttgttactatattgaattgagacataggaaacaaacagtaattcaaacccacaaatcagcctgtgatcacaaatgagataataaaataaatacctgagttttggggaagacatataccataaaccccctctgggggttagaggaattaaccaaacatttcttttaagacatttgagtatatgcctctttgcttatccaagagagatggaattgtaagcaggtcagacactcccaggtggattagcaggtgggagcagtaagaaagatttccaccctaacttgctttgctcatgtcacagaatcatgcaaaacctccccctcttctgggagaaggggcaaaacccctggcctggcttcataaagatatttcttcaaataccaacatggcccctgattcttagaaagaattcactggatatttattgaatttccagtccagtctccatctcgccctcccataagttcaccttccagatcattctatgtttacccacatatgccaggaccagctcacagcacaggcccaacatgggacacacctccccccaacacatccacattctcccgaagcccaactcaagcgcacgtcctggaagcagaggcatccctggccatgtcacagtttcttccacaaacctttggatctatcttttgtattttaagtcttggatttcccataagagatgtcaaccatactccctccataccttccagattcacaggcaagagaagccactaggcttcctgcaaagaaatttctcaagatctgagtagggaccaggctctgtcttaaatttctccaagtgagatccacatgcgtggcccttgcacgtactgctatcatctcaaaggccacctggagtgaccagcaaggactgtattcatgggtgacactgcaccaggtgttcctaaaagacagtagttcccagaacaggcagacagaaccttcactcctgattcaccccttgatcaaacctttcacctatacagtccctgctacacactaagttatgcccccaccacaccagccaaattcctatattgaagccctaaaccactctgtgatggtatttggagatggggcctttgggagataattaggacttggtgcagtcatgaaggtggggccctcgtgatggaattagtggcctaagaagaagggccaccagaggtcagtctcattgtctcacaggagaacacaatgggagaaaaggtgactgtctgcaagccaggacctaagcaggtcctctccagaacctgatcttgacaggattctccagaatcctggtcttggattgctagcctctagaattgtgagaagataaatttctgttgtttaagccactaagtctatgatattttgttatgtggcccgagctgactgacacagtccccaaagtacattcctctccaaagtctcggtctatgctcacgaggtaggcatctggccagtgaagtcatcgaggttcaggtaagcagacatccctctattttaggtccagcatcccatggctggtccgtggcaggggttgaacaaggagcagaccctgatatccccaccgccacacctttgtgtcgcttggctgatgcctaggaggccctctttttcctctgcatctgaatcctgcttgtctgcccatgatcaggcccaaatctctgtttcttgcagccaacagctcctccctttctcagctgtcctggcgaggggctcacaccctggggtcagagtcccagggacacacagacagctggggtccaaatcccagctctgccacatcctttcatagaacttgaggcaaatcctaaccctttctgtgcctcctctgttaaaggtgggcaaaaactattcccagcttctaaggcttttagagagaatctgagtcaatgcatgcaaagttcttcaaacatgcaaggcacatcataagaactctgtaccacattacttgttttgggaatcagagccaatcttttaagtcctcgagtctcagtttttctcatctgtaatatgggaatgcatatatatggcactatgccaagctaagaaataaccaaaagtagcagctctttctattagcagcagcagtgtgtctcagccctcacacagaggatgcttgttaacagactgaattgatgatggccagtccaccctcttccaccaaagcactttcacctttgaagctatttctgcattttcagaatgggcagggctgagatcagccatgctctcagagatgcattttcacatcctgctgagaggggcccctcccaggcctcactgcgccctagtgtgcgcagacagctttgggccggcgacctgcagagcagcgtgagtcactgacgctctctgcaaaccagaggcctccggaaaccagcccagacagcagactcacaagcaccctgccaccagccattttatgagcaagaccttggggcttacgagaaagatgccacaccacgtgccaaactgtccccagctcttgggatgagtagacatggtgattctgagactctggtttctagtaaaaggggctcactgggaggagagcatgtcactggcagatcagtttgtggccaggaaggcaccaagccccaagatggcaagaggagccacctgcttcgagttgagctcctggaagagaaatgcatcagacgccagccaagcaacaccagacaggacatgccccccaaattagcttccagggaccgtaagacatcctcctagtcctcccccaacccaccctccaccactagacttcaatgatgcctttcaaaccccagatccacatgcaacgcgaggccaacagagcagtaccagaggctgctcttcgggactggagacaccactcaggaagatgtgaggcaggcaaacacattcacctcgagttcccagggaactgtgggtgtgcaggcgccatgacctcacacgtgtcatctcaccgtgcctcaccagcaggtctgtttgcatgtgccatgttcgtagaagcttggcatcagataggcaagctttcataggcactgcctttcagctgtgcatggctcctgtggccctggtgttttgggagggagtagcatgaatcagatcacagaaccccgtatcttgaaacccgtgacattttaacaccaacctctcactggttggtaataccctcattaaggcacagacctcatctctctcatctactgctgtatccccagcacctaggacagagcccagcacatagtaggtgctcagtaaaaatctcaaggaggaatgattgggcgaaagaataactaccacctcctaattgataggacttgcccagaatttttccgatcaggtctggctttcaactgtctcccagagcacagcaacctccgcctcccaggttcaagcgattctcctgcctcagcctcctgagtagttgggattacaggtgtccgccaccatgcccggctaaactttgcatttttagtagagacaggatttcaccatgttggccaggctggtctcaaactcctgacctcaggtgatccgctggccttggcctcccaaagtgctgggatgacaggtgtgagccaccacacccagcctacatatatatgttgttaatcctcacggtcatcccatgaagtaggtattgactgcccccattacacagctgaagaaaccaagtctccgaaagagtaacaaacccaggctctgcagctattatgtggcagagcagtgtggctcaggctacttgtagatagaaattcgttttcacttaccacctggcaacaagaatacgcttctctgaatgcagctcagcacaaacactggtccttgggagaccctagcttttatcagggttgggcagtagaaatcacccacatggtacacaaagaaaaatgggggtgacagtgttggcatcgttgttagctttgggtaacctgtggcggggagcagatactgagatttaagaagcaaagagcggcttggccccctcgggaccactatgccaagcccggtacacatctaaaaggtgaaatggtgctggtgtattacaagagttaaagccaaggcctgggctgcgcagaggaatgactggaggcgccccggcttgcttccattggcaatgttctccagcagaaggggaaaacgtaggctcaattcccacaaacccaccagcaaccggggtttctagacctcacagagcccaggccttcctgtggtatcagtctgactctggcttggggcctgggggcatctgcagcccacgtaagccatcctctctagagagggtgtgacatcttagctccatagcggcgcctgtctgaaagggaaattcaggtcacctccaagggtgacaggagtcagtggcttccacagcagaagcctgggtgttatgaccacttgctggccgcctcgtcggaattccatcttgattgactctccctagctgcctgccagcacccacccactgtcaggacccagggatcccacttggcctttaagactgaagatgatctgcttctctccctcactctcccctagtccacagtcttccttagtatacgctattcacgtcaagcctgctcacgccccagggcctttgcacctgctgttcgctctacctggactcctgctcttgccttagacacctgctgttctctctacttggactgctgctcttgccttagacgtttggagggctctcttgataagacctcttctcaaatgccacctcccctgaggtgctccccttactggaacggcaagcaggcctccgtgccaccccatcatgccctgtcccccagcctgcttttctcttccaacagaacacttggcacccccagttttatcatttatattttcaaactgcaagctgtaggagggccgggactttgagcctcttcactgtgttagccccagcagtgagcaataaacggctgttggatgaatgaatgatttagcgaaagaatggacaaataaatgaaccgactatggcttccgggtattggcaacccagtgctgacttcatcttgtggacatcgggtgctgtagtcctcagctctgtagagcagattccaaggaaactgggaatcacgcttcatggtcacaaaggaggagacagtgcctctgagctcttgctcatgctgcactcctgcctggcaccccatctcccctgctaactagtgaaatcctgatcccaaagttgcagaggcccacagcccctagggcacccagccgcgtgcctggcatttggaaggcttattcaactgctgagcagacggggtcaggacgagaaccgtggagtctggaaccctaagccttcactttccactcggtccaacttaaagaaggagaaattgtttcttcgtttgtgaatatctccatcctgagcttatttcatatgccaactgggacatggctagaaattgcccatgaaaagactgtagcaggaagcaggttttaagagcagcagatcctcaggaaacctgagctgtttagagacaggagggccagccttccaaccaaagtcctctgtggcccaaccctgggcatccatccgctcaggccactgagtgtccaggggagggagaggtggaccacaaggccaaagccagtttctcaagcatttcccacccatgtggcagggtcggtggctgggaaggacagtgagcctcgtgagaagtggctctttatttctagtatgaaagataacttttagcagcctttgaaaaaacaccataaaaattcaatactggccaggtgtggtggctcacgcctgtaatcccagtactttgggaggctgaggcgggcagatcacttgaggtcaggagttcgagaccagcctggccaacatagggaaaccccatctctactaaaaatacaaaaattagccgggtgtggtagtgtgtgcctgtaatcccagctactcgggaggctaaggcaggagaatcccatgaacccaggaggcgtaggttgcagtgagccgagatcgcgccactgcactccagcctgggggactgagcaagactctttttaaaaaaaaaaaaaaaaaaagccagagcccagaaagaggcccacacttacatgggaaagatatttacaacaccaacagattacatcttctgaatagatggttggtgataactagttatccatacaaaaaaacagtgaaattagaaccttccctcatactggacataaaaatcaactccaggtggattacagacccaagggtacaaggtaagactgcaagaagtttggaagacactataggagaatctctttgtgacatcaaggtagagaaagattttctgacccactgctttaaactggtgggaacctctgaatcagttggaaagcttgtaaaagcacagactgtgggtctcgctggcagagtttctaattcagcaggactggggtggaggtgggaatttgcatttctaacaagctcctgagtgacctgacaacacatcatcctaaactacacccagaaaactcacacctttcagaaaagaaatttaactacatgaaaattttctgttcaccgaaagacatcattttacatgtaccagctaagtgaaaaaatttaactgtctgacagtatcaaactttgtgaggttgtagagcaatgaattacatatgtgttgctgatgggagtgtaaactggtataactgcttcagaagacaatttggtatcgtctactaaagttggaagtgtgtgtacaccctgtgaccatgcaactctgcttgtcagtataaccctacagaaagtcctctgtgtgcaagcaccaggagacagcgaaagaacattccagacagcactgcctgtaaccagaaagaggaaaaatctggaaacaatcaaatgcccaccatcagcagaatggaaaaataggctttacaatggaatattatgcagcagagaaaaggaaagaattacagctaaagcaaagacaatgagtgaaatctacaaagaaaatgaaaaggaagtggcaaacacaaaattcagggtagcaattatgctaaggtgtgaatgaagaggatgtgtttgaaattgtatccagaatcactgagcatcatggctgtgaacctcagagatgagcccaccagacccacctgcctcctgacggaggaacacgccacaccgatgggacagtcttgccaaaagcatcgaagctgaattggatcaagcctccagatctgactgacaacttacaggaaataccgaggacagagccacgtgtcagacgacagtatgcgactgcaacctgcaaaacccagactacagaaaattctacaggacgaactggtttcttcagtacaaagatggcaaagagaacagatgaatgtggggtatgagcagacaaaagaaactgaaaagacatttcaaacaagcacaatatctggtccctccttgagtccagagtcaaacaaactttaacaaaaagaaatatggccgggcacagtggctcacgcctgtaatcccagcactttgggaagctgaggtgggcggatcacgaggtcaggagatggagaccatcctggctaacacggtgaaaccccgtctctactaaaaatacaaaaaattagccaggcgtggtggcgggcgcctgtagtcccacctacctggcaggctgaggcaggagaatggcgtgaactcgggaggcggagctggcagtgagccgagatcatgccactgcactccagcctgggcgacagagcgagactctgtctcaaaaaaaaaaaaaaaaaaagcgaaatattaggacatttatgagacaattgagaatttgaacactgagtttgataatattaaagaattcttcatttttaggtgtgataacaatatcaggggaaaactgtttttttaaagtcatcttttagaaaaatgtaactgaaagatttgccagaaaacattttctacgcagaagagctcagaggaaatgactatcctattgttctttaagcttagggggaggggtaagtacacagtatgtttgtgtactcacatatattttaaacatatttatatgcatttaataaaagcaatttattatttaaaggaaaggaagagagggagagaaagagggagagaaagggagggagagagaagaaagaaggtaatgaaggagggaggaagagagggaaggaaggcagtggggaagggattatttggagagaaggaagacaaaaggagacagatctcctttgcacccaccatacaagagctggtatttttgcacatcctggcacatctagagagcattctaacacacttagggcaggagagtgtcacctctcagagaggccttccttgatgaccctgtctaaagtctctcccccagcaccctgtttcttttcttcatggcatgtgtcaccagctgaaatctatttctttctggcatttttttcttccttactagactgtatgaaccacagagcaggaacctcactccattcacccagcacctaccaatttacctggctggaagcaggtgttgatagatgacagtggtgatggtgataatgatagtggtggcagtggtggtatttggtatctactgggtatttactctgtgccaggccttgttctaagcaatctacatgtactaacccacccaatgttcacagtgacccatgaggtaagtgttataatgattactcccattttgcagttcagtaaatcaaggctcagtgaggcaaagggcctcgatcagagttacgcaggtagcacgtggccgagcaatgatttgcatccagaagttctggttccagggcctaccctggattcctgccttgctgataacatttcatttaatagtaaagacagaagctttttttcaggcctaaagtgaccctgagttaaccactgaagttcaaggaggacctgattaaacctaattatttctcctgcccatactagccccagtgttctttatccatgcacacacacatacacacacccatacacacacacacagtataactacacctggccacactacaaaccatagtgcaaggtcctgaagcaatgcaattgtctttttttttttttttttttttttttttttgagacagagtcttgctctttctcccaggctcgtgtgcagtagcacagtctcagctcactgcaacctctgcctcccaggttcatgcgattctcctgccccagcctcctgagtagctgggattacaggcgtgtgccaccacgcacagctagtttttgtatttttagtagagacaaggtttcaacatgttggccagcctggtcttgcactcctgacctcaagtgatccacctgccttggcctcccaaagtaccgaaattccaggtgtgagccaccgcgcctggcctgaagcaatgctctttgacttgttttctgcctggcacacagtaggcactctgcagatgtgttgagtagaactgaccaaagtgcaagaaatttgggccaggatgccaaactttccaaagcagaggtcccaacctcagtgagaaaacatcactattaagagccccattagggtgagcgagcccctctttgaaattcaaggcccccataggagggagccctaaccccattatcacacccacccagcaggaatttacttaactgctttcccttcagctccccttccagccttacagaggggaccctgaacagctaagaactctgataataagaaaccaagggctataagatctggagtttgaatttagggaattctttccaggataggcctggccagagcctgttttggtgtgagcccccatgactggcacactctggcatcacacagctgggggtgattggactggggaaggggtctgcgaccaaaaggggtggccctcttagatgcagccaagccgtctgcattctgagtcacaaggccatcctcagaaccttctccctaataggaacagaacaggaaactagcatgctgagagctgctgcccccttctccacacgggccagggggtgggcaggagcagggagttccagttcctgggctgaggcatgaatttctcagaaccctggcagcctggaaaacacagagctggtttctgttttccacccccagaaacagcctgtaaccacagcaggagggaggccccgctggcctggtcgggagcaccctggccaggccaggatgcaaacactgctgctgtttagagagggaaaccctggccggctcacatgcccgattcctgggcgtccccggccacctcatactctctgccagctgggtccacggggatgctatcttcgggaggagcagggagttggaacgcagccctcagaacaggggtgcatgccagctgggctagacgtttggcatgcaaagggggtgcaatctcatgggtctccctgcaaaaggagtacttctgtgtccaaaacaagctggtgccaagcacaacagaacaacaaggagcacaggagaaggagaaggagaagcacaggatgaggccgccgaccccacccccgccccaccgaccccggcccccccatcccccgctcccgccgcccccccccctccccgccaaacacatggagccgagtacagtgtcctgctctccaggcagccagctcccgggtttcacaatcctttccatggcactcgggtttgctgtcacaacaactgcaggatgacccggtgctgggcagcactgctggctggaggtgagaaatcgattttctcaccggcccagtggccagcacatttttgaggtcatgccccggcctggcctgtggagtcccccaagcatctgcctctgtcaatccactgtgccctctgaggctggactgcatggcactaagagggccctgggttccaaagccatcctgctgagaagagataacagcctgattctaggaccaggacacagtctgtctcctcagggtttattcactggcaaatcttgttagcagatgctagaggtttttatttgcactcctgaactcccaaagaaacatatggcatcttttttcaaaaaaacctaaagaggcggggtgtggcagctcatactgtaatcctagcactttgggaggctgagctgggaggactgcttcaggccaggagttcaagaccagcccgggcaacatagtgaaaccctgtctttacaaaattaagaaaaaacagccaggagtggtggcacacgcctatagtccagctacccaggaggctgaggtgggaggattgcttgagcctaggagttcaaggctgcagtgagccatggtggcaccagtgcactccagcctcggtgacagagcaagaccctgtcccctccaaaaatattaaataaaaattttaaaattaaaaacaaaactaaagaacatgtacaaatgtactcacttgctgtgggaccttggaccagttacttaacctccctgggctacagtttcctcatctataaaatgcctctgcggctgccatgagggttaaatgagctaatgcagcaaagtcttagaagaatgtctggtaaacagtaaacatctaagcatgagctgctattatcattattgttcttttgtgacaaatagttttaaatcattttaaacccaggcagtctcggttctcagtttcatgcctggttattcattcgataccacaaatattgggtgagcaccttttatgcaggaagctgagccaggtctttgagcaaagggtggacgtcagcaaatgttgtcaagggcttcccatgtgcaaagccagcccaggggcagtcagcagtgcagacaagtcacagcatttgtcctcactacccagagactcgagcaagggagaaaaaataaataaataaataaatggaaacacctgaaagagaccatgttcatttccaggacttcaaggcaagagagaaaccctccaggtgcagagcagagacattgtcagagccttggaacgctggccagatttcaaaagtcacagcagagagccaggcatggtggctcacgcctgtaatcccagcactttgggaggccgaggtgggcggatcacctgaggtcaggagttcgagaccagcctggccaacatggcaaaactccatctctactaaaaatacaaaaattagccaggtgtggtggcacacacctataatcccagctacttgggaggctgaggcaggagaatcaactgaacccaggaggcagaggttgcagtgagcagagattgtgccactgcactccagcctgggcaacaaaacaagactctgttaaaaaaagaaaaaaaaaaagtcacaggagagcaggatttccaggcggtggttaaggcatgggcaaaggtttggaggcaagaaagcctccgcacagccgcagtcatcctcccctcacagctgaggggtgggcgaggctgatcatgcatacacacagccggaaacacagccccaaccagaacagaaaggtttctgtttctaaatcctcattttcactccagcctctggggtcatttctaggacctgaaatctgcccctttctttttaaaaattctctcctaggggctgggcatggttgctaatgcctgtaatcccagcactttgggaggccaaagttggtggattccttgagctcaggagttttgagaccagcctgggcaacatagtgagaccccatctctacaaaaaataactagccaggtgtggtggcacatgctggtaatcccagctacttggggagctgaggtgggaggatcacttgggcctgggagtttgaggctgcagtgagccatgatcctaccatggcactccagcctgagtgacagagtaagaccctgtatcaaaaaaaaaaaaaaaaaattctaaaaacacaatcaggagaaagtctcccttctactcttgctcagtatttccttgtgtgtctgcatcttattaacagacatttagcctgtttctagtctcctgctactatagacaaggctggagtcaacatcccacacaccacacgcagcaggtatctggatggacccggcttcctgaagacagatgaggcttattgtggtccctgagtagttggccaccacctgtctctggggatccaggaaaaccaagagctcctgaagtcaccaagcttcatgccagagaacactgtgcagggctggggaccagtgacatggaatcaacagccagcctggctcacagctgggccagcacacctctaaagatacatttctagaagtgggatattctggattaaaagatgtgtgcattctaaatttgggttcatttcaccaaattgcccttcaaaagaggttctacccatgcagatgcccaccaataatgactgagaggacatgtttcacaccctctcaccaataccgcactttatcagcctcccttccttccattcctcctcctcctttccctttctttcttgccaatgttgtcagtctcacaggaggaaaaactgaccctggtctggaacaatcctgcaccaaatacagataatgatgttcagataataggaagtccagggaaaaagaaaacagtaggagtttaaaaatcccagagatagctgccaggtgtggtgactcgtgcctgtaatcccagcactttgggaggccgaggtgggtggatcacttgatgtcaggagttcaagaccagcctggccaacaaagcgagaccccgtctctactaaaaatacaaaaattatccggacatggtggcacactcctgtaatcccagctactctggagactgaggcaggagaatcacttgaaccctgaaggcagaggttgcagcgaaccgagatcacaccgctgcactccagtctgagagagagagagtgagactctgtctcaaaataaaaaaatcccagagatagctgagggaattggttctgaaatggtccagagagaaaacagaggaaccagaccaggaccctcaggactcagaggacctgccggctctgcctgggtagggcacagcacccacctgggattcccagggtgccagctcctggcttctcactctgtctggctgaaggggctgctccctcaaacaggaagccatgatgaaggggtttcacatctgtctggaataaagggcccgttcaaatctgggagaggctacgtgggggccaaaaactggtgagaagatattaaaggagggttggcacatcccaagtgcagagatgaagacatttctgcagccctggacagataaagatgaggctaagaagatgatgaagctgatagctgctctctatggagtgctgtgtggctgacctggttatactcacttctcatacatcatttcctttaaacctcaagcactgctaatatccccattttgcagatggggaaattgaggtcacagacattcagtaactcacctaaggccacacccccaagttccttaggcaacagatgggagctgagcatgggggccagagggacagtaggggcagtagcaagaattcactttagcgctggttgaatgtgaggttcctgcagggaatccacatggagggcccaggaggaggtcagatcagtgggtctggggcaaaagccagtttcctggagtctcatcagatgaaggagtgaaaaggcagggggagcagcccaggataaatgccctattctctttatacgtggactcagaatcacttctcacacacgtgcctctaaccacccattgcctgtgcctctggctttgtaacctcagacaaatccctcccttttctcagcctgctttcacatctaagatgcagagatgaccatccctgccttccacggcgcccagtaagggggagggatcattagcattgttacaatatttcctgtacttgtcagtctggcaaacacactccctccaaaacttcaaccttccacctgccagtagcttccccttcctcccaaaataaaatccatagctctcaacccgcgaggcctgtcccctccatgctccctttccatgacgccgccgtcattactctcaaccacaccagacctctctctgtcctccacacaaaccacgtttcctcccagctctgccctacgtgcttgctcttccctctgcctggaattccttcccctcactctcttcctcccggtctcaaatccaaagtcacttcctcaaagaggttggtcctgaccaccccgtttgaagttatgcccgtccccatcgtcactttattgaactccgcacttagtctccacccccaacatctgaaattctcatcattttctggttgacatttgatgaacagccttccccttgcagagcaagctctgccagcagggaggccccatccatttggttcacttctgtgtcccagcacctaccaccaagcccagctcactttacatactcagtggatatctgttcaaagaaggaaagaacaccagttgataagaaacaaaccaaaaaagcaaatgctcagcaacacgccccctgagcagttcccgaggcagccagcctgccagctgaatgctaaaggaggcggcatccacatcacagcatcagccctccctggtacccgcggggcaccgggcagtccgtaagtcacttttcacacatgcctcgcccaaggccacaagcaaggaagaatgaaggctctgaatcaagcttcctttgacactaactactcagcaacatcttctgaccctggggcccctgtcctgggtgctgtactagggaacaggcggtgccatggggagacactagttcccggtggcttcccacactcagagagtgctaggaatgctccagtccaccagtaacaatctttttgtagagtggacactccttccccgaaacacacatggtgtggtcagcactcaatattataaagctgttacttctaccagagctggacactaaatccttcagatggtggttcttaaccaggggcaactctgccccccaggggatacttggcagtatctgcagacatttctgatggccacatctggggtgctactggcatccggtgcattgaggccaggaacgctggtacacatcctttcatgcacaggatagcccctcacaacagagaataatccagcccgaaatgtcagtagtgctgaagctgaaagacttgcttcaagagaaaaggtaataagaaaatgttttgagattcctggactgaccgttaggagaggagtttcctgaatttggggaaaattggcaataactggacatttaaggcctcaccctcattctgttttaggttttcttttgttgtttgtttggtttttttttttttttttttttgagacggagtctcgctctgtcccccaggctggagtgcagtggtacgattgcgtctcactgcaacctctgcctcccaggttcaagggattttcctgcctcagcttccctagtagctgggattacaggcgcatgccaccacatccagctaatttttgtattttaagtacaaatggggtttcaccatgttgggccagactggtcttgaactactgaccttaagtgatctgcctgcctcggcttcccaaagtgctgggattataggcgtgagccacccccaccgccctaggttttctttatagtacgtatttaccacctgacattataatatatatttatttcactgtttgtctcaccaactaagaagtacgctccctgaaggcagagactctgtttcacatgctgctgtgtcctcactggcacacagtagggattcaataaatatttgtggaataaagaaactcctaagaatatcaagtcatacaaaatatccaacctccttttgcagctgttttctcattatgatcatatctatcctgcacaaagaccccaaatccattctcctgtcttccacagtagcaggtttcagctatgcacatgactgggtaatataaatataaaaactatacttcccagcctcctctgtggctcagtgtggttacataacaagactctggccaatacagtattagctgaagggataaatgtgatttctgggttacgcccttaaaggaaagggcgtgccctccttcctcttttttcccatccaggagccatcttggatgactcagatgagggtaccatcctgagaatggagagtgataagacagaaaaagcctgggttcctggtatgatggggccagcataccagccatggactgcttatccctgtgctgttacaagaggaagaaatcatctatcttgttaaagtcattgttactttgggtttggttacagcagcctctacatcctaatcaataccctctaataatcctcccaataacctcccctgccttgcaagcactaactgctttggaatcacgctcaaagactccataacaccgcaaggagtatctcagcagctggcattcgagagggatttcatgatttccccttctcacgtgtaggagatgtgatcctcagttcacatgtaggattatttcctccctcaggcttcagaatatctgaggacattgctaagccagagaaagaaaggacaggaagtcatattatttcagtccttcaaatgataaggacaaaaggaactaccaaaaaaaagcccattaaaatcttaaaacaccaattatgcttaaattcatgagttcataatggtaccaaaaaaaaaaaaagcaactacacacaaacaaccgtaatggatcatcactgtaagatattaatgaaccaacccattattttaaaaactggtaaataaagggaaagaatcaagcattcatcctgcttttcctatatgaattctatcattgttgatgaaggaaagtttctctttatagaagttttccagctaacagtagaggaagggatggcagaattagaatagaatatcaccattttataattcatgcaccactgaattaatggagcaaggcactgactatcaccaaaagacaggcaacccaactccacgtacctcctgtcagaaggatgtgtcatcacccatgaagcaatcttgccaaaaacaattgaatctgaatgaatgaagcctctcagttttactgctaacttacaggacatacagaggagacaggaacacactaaaaacctcatcatggagatataactggcaaaagccagactgaaaaatttcacaggataaacaacctcattttttcaacaaataaattgcaatataatactaatgatgaaaccaaaaaaggatcttattatttaatctagaggaagaacctctagatttaatctaggggaagaacctccccatcaaaccagacttaaaacaaaggcatctgcttgcaacgcttggtctgactcccgacgcaaatgaactataataaaaacaaagaagaaaacacttttatgatatttatatataagacaaccggaagtttaaacactaggtatttcatgatattaaggaagtattattaatttccatgtgtgctagtggtcttgtactttcagagtcctttttttagagatacatgctatttctacacgaaattataggatgtctaggatttgcttcaaaatattgctgtgtagctaggcaccatagcaggcacctacagtcccagctatgctggaggctgaggcaggaagattgtttgagcccaggaaatcgacactgcagtgcaccatgattacacctgtgaatagccactatgctccagcctgggcaacatagcaagaccctatgtcttaaaaaaaaaaaaaaacaaaaaaaactaataacaacaaacccccaaaacaaaattaccaggtaatgaatataacaggatgaaggtgtagaagaaatcagattggccatgcattgataacagctgaagcctcgtggtgggtatgtaggggtaccttgtactatgctatagttacatatgttcaaaatatttaattaaaagttttaaaatcttacccccatttaaaaatcttccccagccacaaggaggggaaggaaggtagagggagggaacactttcgaaggccccggccggatgcaggtcctggattaatgagccttggatatgtgtggcacttccgtaatgggggcacaattcaaacgcctaatgggtccagataggaaccctgaatgagtgaaatcggtgaagtctaagaggaacaacaaaacaagtgtgaagataaataacaatggacaatccacctatcgtcggaagacaaaagggaatggcgggggctgtggacagagcaagtggatgttccaactaaaggaagtagcctctgctcagggccagccttggttttgactcccagtagctgccatgcaggaggtggggcccaaggtggctagatccttggattttctaagcaaagtcagaaatccctatttttatgtgcaatccccggtttttcaacactggcatctaatcaaaatattttttcaaataccgtgtgggccaaacaaaatatctgcgggcgaaatgcagcccatggagcaccagttggccgctccttttccaagtgctgaagcagaccacaactcaatccagttggggagagggtgctttcatcaagtttgggtcaattcttttttgggcatttaataaagctgagaattcaaaagacaccatcaacttccagaaatctataagaaccggctgcggaacatttcaaaggcgtcctccacgtcatcagcttatgcaacagaacctctactttgcccagagttttggaaattaacaacgagggagtgtcctttcagctttcctgggatagtggaactaacaggcttcagatgaaacctatttgttggtttgcagacagcctgggacttaagtccaaactgctcgcaacagacagtcctgccataaaaccaagttggggtgctcaaggctcatcataaaatgaccagagaatccacttcggctgccttgccagagatctgattttatgactgtttaaagggatgagacagatgtcatccccaaacctgagagcagcagaatttgttgctgaggaccagaacggactccttcaaattcagccctcagtttgtctttgacttcatctagagaaagattcttgacactctggatgggcaaaacaggccccagccctgcgtctattcacaggcacaacttgaccagatccctggatccataaaaaattaaagaggtgtcaaaaatgcagcagagaagagccaaataaatggtttcatcattccccaggaagaaaacccctcttttttttttttttttctgaaagggtggaaactaaaggaaaattggtgctaaaacaaagttgaactggttcagagcaaaaagagagtccagaatgttacttgaaggcagcacacaccaaaacacacccaaatctcaagtctaggaatgactggcaaccacagctacttcagggcagggggctttcatttgttctttgtgggttttcccctgggaaaacaaagctttgcccttgatccaaaatgggtttatcaagggtgggaagggaaggagcacagagaataatctagtgtatgaaatgagttgagtaactgccacccaattcatagactaaagtaaccaaattctttttcaagttctacatttctagagagaaacagactacagctagcgctgatattagaaagttatgtagattttttaacattatgatattctggctgggcacagtggctcacgcttataatcccagctttttgggaggctgaggcgagaggatcacttgagcccaggagttcgagaccagactgggcaacatagcaagaccctgtgtctctataaaaaataaaaagttgagccaggcatggtggcatgtgcctatagtcccagctactgagaagactgaggcaggcagattgcttgagcctgggaggttaaggctgcagtgagctatgggggcaccactgcactgcagcctgggtgacagagtgagagaccctctctcaaaaaaaaaaaaaaaaaaaaaaaaggattatcttgggttgtggctggaatcagggaaaatccattgcagtttccagccccacaagttatgctgctgaaaaccatcacctgagtggcggcatcatcctgaaatgagtgaggtagctggcatggtacatccagcatagcacacccacagagcagggaagtgagtcttagcccttctgccctgtgttctagtaagaatgaaactacaaaggagggcctttaaaattggttatgatgctgacctacccataaatcttgcttaaaggagcacctcactctttcacaaggatattcacctgttaccacaagagaatagcctcatttggaaattaaatgtagcataaacaattcagaacaattaaaagtgctggttccagcagatgactgggagcccacgaatgacactggatgctgcctctcacttggtcctcttttttaggagctgtctgcttttggtaggaaagatgctgctctggaatgagggctgcgtggacagcaagtctgggaagggactttcttgtggtttggtggcttctgacctccaaatgcaagtgcacattcctttggaaacacttgctttgcagaatttcaaaaagatcactgagcgtttctgggtctggagtcggctggaacgtagctctcttacataagccagaaatgcagagtccacatcattcgggatgaaaggacagctaagtggcacagcttgaaatctgacattcttagaaagggaggggaaacaagagagggaaacgagagatgccccagggacagatacctgcatatcgtttaggcacccaggagagggacagagaacggctaccagctcaattcaatgatcttccaacagcaactcttgcagattctgtgggctcctctgtaggcaaccacagttttctggactttgacattttcaagactcaaactatcctttgctgaacctttgctgaatttacagaggtagcctgacaacatacttgagaattcaggccaagagtcagcctcctggctcttcgtcagagcctagctctgcccctgcccctatagctcacaactgacaaggaagaggaggaggaggaaaatgtcactgcggttaggggaagaagagtgatcagcaactactgaaccctcaccgtgcgcgtctggtactgggcaaagagctttacaggacgcccccattttcattcttacggtaacccagagagtcgggcaccattataagtgacttggccaaagttacaaaagagggcagtgatgaggccagactgagagccaggcaggacaaccacagcaactctttgccagacaaatcctagaactgaggctgggccttcagaccaaccatccaattcctgagaatgggtccccattgaccaaatgacaggtacaggacaaatcgtcagcactgtgggtaacagcaagtgatacggaagtttccacccatgggggacctgtgtgtacgttttaccaccttttgtagaaaaggggaaaataagaatacatgtgtatttgcatatgctcgggattacattaaaaaaaaaaaaaccctaaagcattcatcctcaaggtggatgacgttgcttccacgggggtaaaaattggttctctgcgggaggggtgttgaaaaaaatcttccatatgacaatgctttgtggccctgcaaagggctatggtacatgaacagacacattgtgtgtctatagcactgacatttcatggcatggagattaggaaaaaaattgtcttaaaaggctcctggctgggggtggggggttggtaataatgaaacaaaggttgagaaataatgttctaggaggctagagaaaaaccagtattagagagcagaccagaagggggaagacatcttctgctggatgtcttttttatatatttttcctaaacataggaacatattacctatataaagatacatttttaaatgaaggcaaaaaaaggacgctggcaaaagccctcccaacgggggcctggccttttattggtgtcggctccaggtggccatgtgagttaaacctgctgctggcggtttctggtggttactggtgtaccagcaaggcctacgctgagatactcagaccgggctctccaggtgcccacagcctctgggccacttggctgggcaactgcctggctcagttctcatcagcacagagactccctgtgtctcaccctctgtcggcaccaggaggcccagccctgccggggtcatcgtggctgccgggctcacggcagggctctgcggtgaccaggctccgcgtgggctttgcacgcctccccacacaggagccgctttgtcccaggcttgccgtgggcactgaggggccctagtgaaagatccctgaactgctgaacaaagcaggccagttacaaaacacttttccatcgctgggttcctttccctgcttcctgagctttggagggtgggtctctctgttcattcctcccccgcctgtttctcacgcattggtgcacccagcttctgcgtagagccttttcaaagcacatccatggcccctctgccagaggcacaactggcaaaacctgggccactggtccacactcctccagggagccatggcaggggatacactcactggagttctcagcagcccccggcgaggacatcatctccctcatgcagatacacatcctgaggtcccctggaggaagcggggggagggagccttgggcagtgctctggggctacgtccactcatctatcccatggaagaagcagggcatgagggtgaggaagcccatctccaaagatcagagtagcccattttttctcctacacaaatagatttttaaaatttgaaccatgtcctacaagaaatcaaggcaattaaattcataaacaaggctgggcatggtgggtcacagctataatcccagcactttgggaggccgaggggaatggatcacctgaggtcaggagttcgagaccagctggccactatggcgaaaccatgtctctactgaaaatacaaaaattagccaggcgtgctggcaggcacctgtagtcccagctacttgggaggctgaggcagaagaatcacttgaacccaggaggcagaggttgcagcgagccaagatcatgccactgcactccagcctgggcaacagagcgagactttgtctcaaaaaaaaaaaaatcataaacaaaacagcagatcacatttatggaagatcccttttattgacatgcactaactcatcatcctcagcacagcctttgaagggaggaactgtgactgtctcattctacagatggggacatgaaggcacaaggcagcaagtaacttgcctgaggtcagagtcagtgatggagctgacactcaagacacaaaagagtcatgaaatctgacttttgtttgtataaaaaggcaacatgaatctctggagttagaaggcaggatggtggtcacttttgtagaagggaaagggacatctgggggcttctggggtgccaacaagactgtcataatccaggtggcaattctgtgggtggcccgcttgtgaaatatacagaatgcactactgatttctgaatgtgcacataattaagcactttacatgaagaacagggcagaagtagatttaagaataagcagactgatttgtgccctccctgcacacatcaatatactctctctcacacacacaagctgctatcctcacaagtcactgcaggggctgcagccatcaccgagaccacatcctttcttttctggacgtttccagaacggggtaaaacatctcctttgagtcccaggccacacccctgcccccatgttctctcatctgtggctgagtctctgggcagctgtagtaagctctctacttcaaaacctgtggtgggtttggtggtgagatggcccgatgacctctgcacccccagttcagctgtggagtcagcacagctcctagaatgcaccacagagcgctagtaaaagtcacctctgagtccactttccccagcgcctctcccgcttgcttgcgtcctgagtggtaaaaagtgcagccgcccctcattttatgcaagggaagctgagaattacctgtgtattgatcacatttgggcaattccagttgcattttaagtaaccgcgctcatgacagggcctgcggggcacactccctgtgaaatgcaccgccttccatcatgctcctgtcacgggattcgttttcaattcacacatcccccttttttcaacccttgactccctatagtccatttcgcaaaggcagccagagtgatcttctcaaacagtaaatcaaaccacgctgcactgctgctgaaagcctgcgggagcaagcccacgtctccgagttcacggcctccgccacctgcgttccctctccctgaaacactcttccctcagacctccccaggtctgcgtccatccccaaaggccgcctcttcagagtggcctttctgtacactcatctgcaggggccaacctcacccccaaaccaggcagccaccctctcgctcctaaccccgtggaattttccctgtggctttcattgctgtctgaatttcgcttgcttacttactgccttccatgctaatgtctgtctcgcttacctactaaacaatcaccgtgagagcaaagatttcatttcatttgttcacttagtggatccctaagtcccagaacagtgtccagcacagagtagacagccagaaaatactagtgggtgagagggaaggagggtcaaggacagagaagtcaagggtcaaggacacagaggaagggagagagggaagaaggaagggttaaggacagggagggttggggaggacagaggaataggggagaaaggtagggaagaatgaggtcccagaagcagctactgctaggagctgctggtgttccccaggtacaatttggggccttagaacaagggactagtcacggaagggggatgacagcagagagaacgcaagtgacggtgtatgaaccatatgtttctgaagagctgtaagaaagtgcctgaattggggtgggtggagaaacacggggctcaggggagtgcatgccttgggccctggaatattacttattttgcttttccaaagagacttcttgaaaacgtctcaagtactcggagtggagaaagcagaaggagcgccttggtgttccaagaacaaacggggccaagccagccggcgtctgtgtgcaggaatgcaggcgggaagggctgagataaagcacagatgccccatgagggagcggggtggaatgcccagacgcgacgctgggatcactggccaaggtgcaggaaacgataactcagagccgggggcttccctggaccccagggcaggggcgggatcagcttcaaagatggtttgtttgcacttgtgcgggggagggaggacctgtgtgtccactggtgactgcttccttttccagccacagaaccttccctcaaccctcaaaacgcataagcccagctcttacaaagtttccaaggaaagcccactttggcaaaatcccaagggaaataaatgacagaccagaaatgcccacgcacaggcagcacagcacgctggggtttagcacgggccccgtgcagccaaatatgtgccgtgtgcgacagactcccttgaaatcataaacgaaagggacagaaaaggacctaaagaccaaggaagttgccccaccagacaccaaaggaatgacccaggggattttccagtttacttgtcagaaataacacaacacagcaaaccaagacgtccaaatctcatatccctagagctgatggtggcatatctggaatgttccacggatgcacgggctacacagactagctaggagacgggctaggagaatttgaaattgcagcagttcagagacaaaactgcacccacatcttggtggctacggtggagatgcagtctggggcttgccactgggcacgagccaccaggggacctgcccattggagggtcctggggtgggcagagccttggagacaaggccggtggagcactgaacataactagtggcacttgctgccttttggaggccacgtgggtggaaaccattccactgccccatccagctctggcctcaggaatgtgcagcccccaaattgagaagccggactatggcacaggggacagggcagtgctgcgcttcagagctcttgagcttcctttatgttatttctgccaagtatcaggaaaagagcttctaggccagctgtgtagcacgactcccgggcctccattcttgcagaacacagtacaatccagtgtggacatcaccacctggagcgtgcgatgcgctctcctttgtgctacacccccgcattttagagacttataatgtccgctagcaggataaagactctcagaagtcctgcaacaaataattaaacaaaagcaaaaacaaaaaacttggtttaacctagttttttcatcttttaaagccatggaaccctccttcagaaaatagctcctaacatcccatgggctggggtcatacagcatgtacctaaatttcacctcgctcggttctctgagacatccttagagctgactcaggtttggacctagcgggactccccctcaccacgactttgaacctgcctgcgttgagaaagggcctcaggaggcccaaaagggtctcggtgctcagctgctttctctgtaacataagcttctttggaaacggcaaggacatctgtggatccggggctgccatagccagtcatgaccacctcgggccacttggacacgggtgccccaatatccaaggcactcaccatttgcctttaacaagggatggacagggtaggagaggccagtgtgtttctcgctctggagaccagaccagccctaggtgcagagtcagctggggaaaattatccagccctgcacagacactcatttatttataaagcacctcttctccaatacaatcgatcccccagggcctcacgtggagagggatctggttacgaccatgcttcattgatcctccacgttctgccttagttaattctctacacgattgcccccttgaaaataagcaccaaaaccttatcttcaccattgtgaatgtaaattgttcaaggatggattgtatgcaggtgtccgtttcaaaacagagcaccatgactttaactcaacctgtgcttgattattcaggatcaaacggatcaattattaacagagcaatacctagaggtcagccttgtaaggcacgtggggcaggatgaccctacaagaagtggccccagaggtctttgcttggtgaattcaggggacgtttttgatcgactgtctccctagggattgggtatggagaataccagaagtcacagagcccccagataacctggcttgtcaagacgttttgtagagtaaaggtcaacagcctctgactatgcagcagaggatatttctggcactgcggtatatgaaatttagtacccagtcttgatggtaactattgtggctgtttcaaagctttcgctttacttcctaccccttggctgggctcctgagagttaattttctgaaataattgaggtttcagggtatatcagacgctactgcctataaaatacaggactggaactgggaatgacagccagcaatttaggtttttccttcttctattaagaaaaaactccagtcgcttaactgtacatttttaaataatgtaaacagtgtcatgggctttgcaactcgatggataaacgcttgaggggatggataccccattctctatatgtgcttatttcactttgcatgcctgtctccaaacatctcatgtaccccacaaatatatatacctgctctatatccacaaaaaattttaaaagaaaaatgaaggtaaagaaagtccaacagcctatttttctgtctggagcccccaaggcaaggctgctctgctcatcccaccctctccgacctcccaatgcaccttgcggctcccaggtgagtcttagcaatgcggtttgtccttcctccctgagatcctggaccaacacctcatcacagcttctccacaagactaccctctgggcagaccccttgcccacaaacgggcacctacagactcacacaaagcctcctctgcatcttttccttggcccaaaccacccatcagctgggctcaccacagcggaagcccactgcttccttcccatcaatgcgcatctctgttccacgagcacagggtagagaagtgcccgcagcctgcctgcaagctgttctgataaagccacttttcaatgagctttcttcttccttttcctccctctccctccctcaaatatacaaaagagggctataaaatgggattttttttctgtacaggaatgaaaggaggttagctttccttcctattttcttggcctcagtctaaatctggcaattggaaagagtgtggaagcagttaaatggacccagttcatgacccaggggatgccgggttgccctcatttgctttttctatgggggcgattctggaggggggcatctgaaattgttactgcttcccctctgcaactactgctgggaggtaattcttgcacagagctaggggtggctttcagggtcatattattcaacctccttaaattaaaatggggacactgaggcccaaagagattacggaatccgtaggccatgcagtgaacttcctgggcagagatgcttcagggcaccatccttacaggcagtgacaaaactcaagcgtcttaccatcatccaagtaggtctggtccaagttctgctcctgtttaatggtcacccccgcaggtaatacttccttttggtcactgaccgggggtccgtttttggcggctctttggctcgtggcattctgctgctgaatgactgtggggtaggaacccgggctcagcctctgaccttgactgaccgggggcgggccaggtctggtggtgcctggtgcgaaattctcgcagtacatgatgtgctggaactcctggtggcttccgcagcgcagctgctggttggtgggtgagtagtggatcacaggcgaggcctgctggttggtcggagaggggtggagcagggctgagctctggccctgggagccggcgtgcaccagcacagagcggtgagcgtccgcaagggacagcggggcggccatgagggccggctgctgatagcccagcaggctggggctcaggctcttgctccgctggtagagtacggccgctgggttctgttgctggtagcgggcgtcaggggatgagagccccgtgcggaactgctggcagggagccatggtggccacgaggcaggagggggactcggccaccatcgggtgctgggggtagtaaggctggctccccaggcctccatgggtggggctgcagatcagagtggggtcatattcatccgtgggctccgtcttgatggctgggactgggaggagaaaagagcacataggggcgcccatggcagtgagccacggatgtgcacggaggattcgtggatggtgcttgagaacatggccttgggagtccatacgggtgggacaaacagctggtccctgtcacttatcagccttgggcaaaaggctccccatgcaattgtcttaggtaggaaattttaccctggccatgaacatcttgaattatagatttttccaatattggaaaggtggctggtaggtctgactcagccctgggatgtttacagcctatctctccaggtgacagctcagaggagaatgcttgatttcagatgatgcctccccctctttctatcccagcagctcctgtctccgcttgctttcctttctactgcttatccccgtcagaaatgtcatagatgctttacatgctgatttattacctaaatacgccctgcctccaaatgtcagctcctcaaagagaggacttttgtctggtttttgatcctcatgacccaaaacagcacctggtacttaatgggcactcagatattttctagacaaaggaatcagcaaagtgactgtttccttcctccattctgtagtgctttgggggaataagcactactgtctcaagcctcagtttccccatctgttacctggcaggaacaatcatacctacccccacgagatcactgggaggattaaatgtgtgtgcaaagcactgagtacagtggctggcatacagtaagtgctcaatgcttgctgtcactgctattctcttactatgatcatccatcatgactaccacttgtgttgtcgctgtggccattcctttctccctgcccagcaccagtcactgaaatcactccttccccaacatccatactaaagcattaccaatcccaggagttgaggaatcagttttctttttactggagtgagtcagtgacaggactgtgaccaagtgtgtgtgcatgtgtgtgtgcgcatgcgtgtgtgttcatgcatgcatgtgtgtgtgtgtgtgtgtgtgtgtgtgttgtggtgggggacctccaagtattggggtttggaggagataaggagactaggcaaggctgtctctaaccacagaaattgtccctcgaggtgccattcaaaggccatcacctcactccctggcccaactgggagactgagagctcactccagccacactcaaccagacaagagccaaggccgggccacaaatgagaggcaagagcaccatgaaacatatctgagagcatgtctgctcaaagggattcctgagctgcagtctagagcccccccagcaatctcccacagttttgggtcctggtgacctgaaccctgccctgatagagtgtcatgtctgtcccaagacagcagtgtcctcacaagggtcaacacaaaactgtgggcacaagtcaagctcaccaaggcaaggctgccagggcagtcaagctcaccaaggcaaggctgccagggcagtcaagctcaccaaggcaaggctgccagggcacccctcagtataatgcttctagaagcccagaggctccctgagaaactgtcataggatgcaaattataccctgggtgattgtctcgaattataggtttccaatcttggaaggtagctagcaggcgtttctcagcctgggaagcctatagcctatttcccaagggagagctcagagaagcatttttaaaatttaaaattatgcttcccctggctgttcctgtccaccttttctacagccccaatcgtaatccaacatatcaataatatcaacattatctatgacctaatcccctctgttagaatggcagttccacatggacagggattcttaccctgtagtgttcacagctgtgtccacaagccaagaacagtgcctgacactcagatattttctggacaaatgaatgcatgaaaaaatggtactcatcacctttcttggggctgtactttgtgggaatgagacctcctgacccggttatccaccagtcactccattaggccatggggtgatgactcacatgggggggtcacataaagattctgcaggttttagggcacagcccctctatcatgatcaaatccaagccagggacaggagtcatccacttaccacccttctgctgaacatgcgtacacacacccttcttctattcccccttcccctaaaggaaggtactaaggcaataagagctaatatcactgacatcagcttactttgcactgtgctaaggatttatgtgcatttaatttccggaacccttataaggaagatgctgtctcacagatgatgcaactgaggctcagagaggttgagtcatctgtccaaagttacccggctaggagcagacttcaggagtcctgagccctgtgcctgtactgcctctcaataacaaaggggtcatcagaaacactccttacctgggtggtaggtaaagtgctgaggctgacttcgttttctcttcccattgatgacgtagaagttcacttttacaggtgtgcggatatgcttgttccgatattcagggatctcaacaaaaagcatgttctataaggaaggagttgtcatgaacttaactgcaatcatgtctcagttcctacccagaccctaagcgcatccaggcagcccactgtctaatgggtgttttgatgtgcctttcatcggtttacaggggaagttcaatttcaggggaatttaacttgtcagcggcagcaaaaaataatactccatcaaaatataataaggtgtcacagttgcaaatcagagagtgtggtgcccaataaatgttgaactcactcattaatatgcacatattgagtacctgttaggtccagagctctgggggacactgatgaaggaaggagggaaagaaggaaagagcatgaaagagggaaacgtgagggggattgagagacactcaggtgcgtcacgtgcttacgggctggctcttgtccttatccaccgtggcttccatctcccaaatttgctgtccatctagaaaaattcaaaaatgacagactttgaaggaactattagaaaccaaagatttaagacaaaaactcaccaacttctgtttatcttagcttgtatattatgtcatttcagtaaggtgtgtgtcaatatgtgcacgtgtgtgtacatatgtatttatacatataaatatttcctttttccaaaaggagacatggtgtcaatagaaaacaaggcaacattgtcctaagcaaattaaggcaggaacagaaaactcaacgccacatgttctcatttataagtgggagctaagcatggggtatacacggacatgaagatgggaacagcagatactgaggactaatgtaggtgggagacagggaccagggatctaccaattgggtactatgctcactgcctgactgacaggctcattcatacccgaacctcagtgtcatgtaatatacccatgtaacaaaccacatgtacttcccaaatctaaaagttgaagttatattttaaaaaattaaaaaataaaataatgttgacagccagaagaaagaaaacagggcaacaacagaaaataagaaaaaaaatagaaactgtccagaatcctcccatcattttttccctgtatctgaatgtctatctttctattttttttttttttttaaaaaggcattattaagggctgggcatggtggcttatgcctgtaatccaagccctttgggaggccaaggcagatggatcacttgaggctaggagttcgagaccagcctggccagcatggtgaaaccccgtctctactaaaaataaaaatacaaaaattagccaggtgtggttgcaggtgcctgtaatcccagctacttgggaggctgaggcatgagaattgcctgaacccaggaggcggacgttacagcaaaccaagattacaccactgcactccagactgggcgacagagtgagactttgtctcaaaacaaacaaacaaacaaacaaacaaataaataagtaaataaataagtaaataattttaaaaagcattgttatatgttacactttatcctacgccaaagctgttagagaagcgccatgacaggtccctgactgtcccagacacgcctccttggtggtctgagaacacaggcttaaagatgcggccccaagtcatgagggaagccagtgacttcagtggtatcctggctcacaagtcactgaagagcagaaagacaggggctcaccctccacctttcctcagcagacagcctggatctcatgtcactcataactactgatgaagaggttttgctcagtaaactctcctgtccagaagcagaacactactcccccagtttggggccaagaagttgggccaaaaaaaaaaaaaaaaaaaccctgcatttgcaaataattgatttctcttgctgaccacctatactggtcattggtagttttcagctgaaacaaataatttcaacaagtatttccagggtgttttgtggaacactggttctgaaggatattaaatagttttatgagaagggggaaaaatctacatgctaatgagcatttggaaactgctgagtcaaagtcaaatggctttcttcactgcaggacttctcagaagctttaacatgctgctgtgcagagtaactctgcgaggtgggctggagtacatagcacttcccaaggtttgaccaatgaacccctccctacttttaagcacagctattcccatcttctgtgattgcttaggtttgaacccatatagtcttggctcttaagattcacccagcgaaatctggacttcaagcgttcttaaacatactcccacccacctcccccatgaaaaattaatataaagtattgtgattgctctctagatgatcttaacaaggaacacgcaatgaacacgctagagccctttgtaacaattaagtctgtaagtcctgaccttacagcgcaattcctgaaatgactcagcaagacatgggctatgttaaaagggaaaagaacaggcagtttgtttactgactctcactctagtgtcccttggtccctgctgaagggaccaagtcatatttatcaccatctccccaacacgcacaaatgcctaatcaacatctcatgactgaacagacagaagtgtcagcagctccaaaggctgctggtgaggccaagaaaaggccaaaggctaacatcacccatgcccccttgatgagggcagaatacttcggccccctgttttctcagacaactgagcaggcatgtctgatgctcaaaaggaagcaagggaagatcgctggatggacatcgaggaattggaagtgaagtcatcaagacctgagtcctttcagtgtgcaaagtcctgtacagaactagtcagggacaatcctcatttctttgtcaaagacaagtcaaagaccacccaacagagacacatgtccccttttcaggtagaggtcaccaccaggagcgtgactgtacaggccaacctagggtcttcatcaaaaagtgggtcctcatccacacctgcaaagtgagcttgaagcctgaagactgagtaagaaatgaacagcggaaatggcaacatgttgatgtttggtttgtcaccctcccccatagcctctccttgcctgaattgaattcttgaattctgctaccaacagcatcatttctttttccacttatatgagcttgctttgaaaaaaaaaaaaaaaagatcattttcagaagttcataatggggaagaaagggagaaaatagtagctggaaatgtggtcaggaagtattaagtaggatccataaagcttccattcccagctgtcttccaggctcacaccaataagtggcagatgaaacagaaaatacaaaatggcggtccaacaaaaagggcatcaccaagaggagagttctcatggactgtcctctccgggtcaagggacgcaacacgaagaaggagaccttttcccacctctggtgggtgtgcatggcagacaaaactctacccactgacagccatagaattccagcacacaggttcttgagagtacccttagaaactagccagccctgcactggcagacaaggcaactgaggcccagagaagcaaggcggctgtgcaaagacccacagtagttattaaatcacagcctttaagcaacaactgacataatctaataacaaaggagatggcttcaaagacaggtcaaggttgttacacgagagaaacttaccagatcattgtgaggctagaaggttcctgggaggctggagaaagatctcatgtgggtgggacccttgtagggtcactcaccacaaagattcatgcagatgcagatttcaagcccttccctgctttgctgtgccctcaagataccgtggaagcttcactgtggccctcaaggccctgcacaacctggctcctaccctcattcctgcctctccaggcactattcttacccctgagtcttatgagcgctcactacatgcctggcatcactctaagcacctcgtatacatgggcttgtctcatctgtacagcacccataggaggcaggtctcctcaccccatcctacaggggaggacaccaggcacagagaggcaagagcacaggccaaggtcacacagccagaccctgtggggaagccggattggaacccaggcagcctggcctcagagtcagcactccttatgcagtttcagatccctgtgccttgcagctcctccatctagttcctctcctctgagttccagccacagcaaccagcccttcctcgggacgccccaaagtgaggcggtgagccgccacatcccacagcctccccagagcctggtaagtgtgggtcacagggaaagacgcccatggggggcagggggaaagtcctgccctctccagtgttctctgccaggccttccacaacacgctgactggaaccctgagccttcctggccatgtcctgcggccacaaccaacttctgtcaccccagtgctctgccattttactcccacgtaccccaaatttcggagcagacacacccagcttcaaatccttgactacccccaatgatttgtgagaccttagatatggcacgatctctctccctgcctcttatccaacatatggagataatcatagtacccacaccttatggggtcgttctgaagattaaatatggtaacagacctgagcagggtattatataaatgttcagggccgggcaaagtggctcacgcctgtgatcccagcactttgggaggccaaggcgggcggatcacctgaggtcaagagtttgggactagccaggccaacatggtaaaaccccgtctctactaaaaatacaaaaaattagtcagcatggtggcatgcacctgtaatcccagctacttggggagctgaggcaggaggatctcttgaacccagagatggaggttgcagtgagctgagagcatgccattgcactccagcctgggcaacaagagcaaaactccatctcaaaaaaaaaaaaaaaaaaaaaatgttcaacagaagatacctgttacgattatggctagtggcaacagattatttcaacactgtcttctttatcatttgttgcatatattccacaatgtgtcaatactgagaaaaacacaagcattttaaaatcagaaaataataaacattttccaagtgcattttatgattgcaatacttctgcctacaggtttgggctggagggaatttatgaagcgacgaagtctgttatgggagactgcagcatggtgcctgattttcctttgctttccaaagtgggtcttttcaccattaactttaaaaacacacacagagaaaaagacctcagaggaataagaaatcaaaacttaaactatgagccaagggtccatcttctttcttttgcacccttttggtaccagaagctccaagggcagccaaggaatctggcctgacctgtactttctcatggaaggtctgcactcggttctggacaaacaagtccccaacaggaagtgaaagcccacatccgttgtctttcttgattttatgcagcacgtgcaagacacactccaggaggctggtctctaagggaagtgtgcggtttgcaaggtaccttggggtcattttcccaggctcctcctccccactccaccccgcatccacgggtgcacaagtcctgggctttcgcctggagaacccaataatcccaacctctgaattgcactcccatggggcagtagaattcaaaacaaatgctgatggggccaggtgttgtggttcacacctgtaatcccagcactttgggaggccgaggcgagtggatcacttgaggtcaggagttcaagaccagcctggccaacgtggcgaaacccgatctctactacaaatacaaaaattagcgaggcatggtggcgggcacttgcaatcccagctactcgggaggctgaggcaggagaatcacttgaacctgggaggtggaggttgcagtgagccgagatcgcaccactgcactccagcctgggtgacagagcaagacttcatctcaaaaataaaaaataaatgctgatggagttttctcagcctgatgtcactctgcccaggttcaagttctgtccccaaagtttactcactgtgtggccttcgagtggcagctctctgtgcctcagtttcctcataagcaaaaatgataaagtttggccaggttcggtggctcatgactgtaatcccagcactttgggaggccaaggtaggtggaccacctgaggtcaggagttcgagacccacctgaccaacatggtgaaaccctgtctctactaaaaatacaaaaaattagctgggcgtggtagtgggcgcctgtaatcctagctacttgggaggctgaggcaggagaatcgcttgaaccggggaggcggaggttgcagtgagccgagatcacaccattgcactccagcctggacaacaagagcaaaactccatctcaaaaaaaaaaaaaaaaagataaagttaatattactgaacttaagaagatgtggcgagaattaaaatagacagtgtatgtgaaatgcttagtaaaattcccagcgcatagttaatgctgctgtcattactatgattttagaatttggagtcttgcattgttctgattccagtaaaaaagaattgaagggccatcctgacccaagtgctttggtgggtattgaagttttttgcttcatttcattgcattgaattcctcattgcaaataaataaaatggtcataaaaagtatttattggtaggggactggttgaattaattatgggccacctgtaattagtatggaaaatcagtagaagagcactgggcagcccttaggtagatttgtgttttctaacctgaaaacatgaccctgttatattaaaaagcagattttgctgggcacggtggctcacgcctgtaatcccagcactttgggaagccgaggtgggtggatcacttgaggtcaggagtttgagaccagcctggtcaacatgctgaaatcccgtctctactaaaaatacaaaaattagctgggtgtggtggcacgtgcctgtaattccagctactcaggaggctgaggcatgagaatcacttgaatccgggaggtagaggttgcagtaagctgagatcgcaccactgcagtccagcctgggcgacaaagtgagcctctgcctcaaaaaaataaagtaaaataaaataaaataaaaagcagattttaaaaaaatgctgcagaccagtatgtaccgcatgatgccgctttgtaagtctattcttaagtctgcttaaacttagaaagcctgtgccccaagctactcatatggttgtacctccagggctgggcctgaatgcgtgaggtgagaccttcatgcctttcttcactgattcaagaaacatgtaacatcacagtgactttaatttgtttatatttttattatttttaaataaagtttgttttttttttttttcttaagaaaaaggcacattgcaactgcctgttgactttcctgtctcttgggagccctccggggccacagcctgagagggaggctgggcatggaccatcagctctgactcagctccggcacagctgtaccccaggccgagagatggaccatgtatgccttccagccctccggggcccccaaacagggaggcagggccgaacattccacccaggctcaagagagacatggactcagggttgcttatgtctactgaggtggggacccagcctctctacccagctttcctcccctgattccattagacacactggccttctctctccctccaacagccacacctgcctatctccaggccttggaacttgctgttgccacctctcaagatgcttttcttcagctcttctgtgaccatccccttcccatccttcaggtgcagctcagggagacccccccttcatcctacaccatccccttataactttctactcctcccttccagcctgaaatcattttagctacctattggtttgctatctccacccagcctcaggctgtgagttaccccagagcagggctatagctatctcattctctgctttatccttagctctacagcatctggcacataacagttgctcaattaatactggctgaataaacaaacaaattgacctcaggatcctccagtgtgcaccctacagccagggtccaggaaacatctgaccactgacctctccagccgcaggaccctgcaaggaggaatcaccaagcccttattacgggatcctttgtgggaatcagctgatgaggaaggagctgggaatatgggtgcagacaaggaatcaaacacaatcagagcaacacagcccagacagcattcccagtgccattgaccagaagttccgtataatccacctcccaacccacaccttgggtctgggactctgggcagacctacccccgtggaacaggactgagaagaccaagtatgcttctaccgctctgggctgagatgaaataaaggacttcggtctcttgagcagatgttcaggcaaaattaccccatccaaaattaacaaggactggcagccggtgtgaaaacagcccttccaagtcttagtcagaggggaagagaaaggagccaaccactttgggcaaaagggttaggtctagagaagacttagcacaactctgcaagttaaaaaaaaaaacaaaaaaaatagggtggggggatggctaaagtaacatcatagcctttgttttgtgtttgtttgtttttgaaacagggtctcacttcattgcccaggcaggagtccatggcgcgatctcagctcactgcaacctccacttcccaggttcaagagattctcctgcctcagcctcccaagtagctgggattacaggcacatgccaccacggccggctaatttttgcatttcaagtagagatggagtttcaccatgttggccaggctggtcttgaactcctgacctcaggtgatccgcccgccttggcctcccaaagtgctgggattacaggcatgagccaccacgcccacctgacattatagcctctgctttatcttcactgcagagtcaactccagaagaaaacccctactagatgcaagaagaatgggcatcgctaaccagcccgtttgctgatgtatggcccctatactttcgttggtttcctggtttctctttgcaggcaattatttaaccctgtgatggaacaaagcagccaggaagcagtagggttggccgtgggttggggctggagtcttagcagtcagcctggaggagctgcgggctcatgtcagcactctgggagaaatgagcaagcttttgggaggaggaaggcaaatccatcctcacccgggctgtgagcatgccactgggctcgaggcgaatggggaggaaatcaaagtgtcagctcgtgttaggaaaccgcacatgatgcttcccagtcctggccgtgcttttaaaaattagccaaataaaaatggttgaagtcatttcagtctgctctttatgactgctaactagcagaaaaacgtgtcctccctggaagcatgggcttaatgagcccagcagacaggggtggggtgggggagattcaggaatggcccccccagcttaggatttcagccgcccgacagggtaacactgctcaaatggatttactgagatctagaaaggaagtcccttgattcccgagtctcctgccccactacttccttggtgggcttgccccaaccatcccccaccgggacaactggtccagctgctcactcacctcccagtttctccgagtgctgccccccaccaagtccactgttcatacaggtggccagagcactcaaacatcaaccagaccatgccactcccctgctcaaaaacctccaacaactacctgttgctttgggaattcaatccaaactccttgccatgactgcagggcccagctgggcctgccccccgcagcacctctccaggctgggctctcactctcacgacgcaccagccgcccgggcctgcttcccattcctcaaatgccctaagctcatctccacgctggggccttggcactgggcagctccttttgcctgggacactctcccagcagtccttgtggctctctctttcccaccttcaggggtctgctgaaagccatctcctccagcaagagctccctgactcctctatccagagttaccagatttaaccaataaaaatacaggatgttcagttaaacttggactgcagaaaacaacgaatacctttttactgcaagtatgtcccaaactccttgccattgtatagaacatacttttactaaagaaattcactgtttgggattcaaatttgactgcgcatcctatattttcccccctaactccacacgcttttctctcttgggcctgtgacctggcttccctggcttcatagcattttccccatctgaaagtgtcctgcttataaacaagtttcagactgtccactcccaagggcagggacctcacctgccatgtgtcccctgtgcctggcatggcactgcacatagtaggtgctcaataaacacccgggaaatgaacatggaagcaccgggggctgagtgagtggagcaagcctgagagggcacgcttggatgctcagtcaaggtcaatcttacacagaggtcggatttcagctcctcccctgtcccaccctagacgtgactcttctcggccctaagctgtcatctgtggatgatccccacacatttcagacagccagctactctgggaaccaggaagttggggtttcaggcccagccctccactgatgaactctgtcacctcaaagaagtctagtgaccacactgtgtgactcgacttccccatccgtaaaatgggaaggggaggaagcagaccatgagttaccctccctccagctgccaggctatgactccaggagtctgatgggtctagggtaaggacaggagaggaattcacctcgccaagaaggactcttctcccagacaagaaaccaacatggctctgccctctgaaccctgtgtgaagtcaaccaggctcccagagtgcaggtagaagggcagctgatgttttctgagcacctactatgtgcctgatactttcagttccttgatctccttctattgctaatacaccaccaaccccatctcagagatgggaaaactgagtcccaaggtacatagtgtgaggccaatccaggcttcaggccgagtctgctgggtgattcaaaatccagcctttgaagtgggaattacacaaaggcctttggtaccaggaacaatttctgatggtggaagtgcttagacacaatgagtgttctaactaaaaactcatttctctgtggcctccttcaaatggatgcaaacggaatgaactgcaggattcttggacttaaaagcctgttcttcaatgcaggggaccaagtttaggcaaatatttagatccctgaaaacgagaccattttctctatctccacggcagcttcggagttgcaatctggatcgcatctttggagagcagcttcgtgtcccagcaaagctgtgggtaagtgatgggctccagcccggggggccactgacaccagggacatgagtcacagagggcaaaggtccggagagccttagtcatgccccagccctgtctggagtctgacatttcccagagggaagccccatctagagactcccataccaggtctattgtttcagagaacatcacgccgggtacaaccaaacccagggagagaaacaggtgggaagagcaggtgtctgctctaagatggttccgattgttccagggcacaaattcacggaaaaatacttaatttagaaaaaaaaaaattattttaagcatatgcatttatatttattaaacaaagctcaaaatacaacctttggggacctccaagtaataaaatgactcatgtcaggatatgatgactcagtgggaaagagggaattccaccacccacgcgtcctttctaaaaaatcaatttgtcctctggacaggtgatgggagcctctgccatcagaccgttccaagaaaatcgtccagcaaaacaaaacaaaaaattctcttcaaacaatttaagtttcaaagctgagtaatctgatgcaggccagtttccaacctacgcccccgcaggacacacagagccagggagctagttggccaagcctgggggcctgaattaagaaggatttaccagccgaaaaattccaaaactctgtgtcatgtgaaggaaccttccaaaacattggatcccacccaggcgcagcgagtcgctcaaagccatggcaacccctttcccgctgccacatcacttttatttttgtgtccttagattttttcctgttttgcaatgttttgctgggacccccgactccgcctgaggccctgtggccaagggccagggttcccactgaagtcaggaacagcctggacttcccagcgtgaactttgcctgaagggttacacattttttaaatttcagagaacatccaaatggcttttcagcaattactgagaatgataaataggaaagaccctgattgttctgtttggtttctctgtcctctctgacatgactagaaaaaattactcgagttgacgacaaatgctgccttgggattccacctctgtcaccagttgtgggctgacctggggtgcatgacttgacatctgtgagcctcagttacctcatctgtaaaatggggataatgctgcccgcttctcagggctggagtgacaactaaaagagatgcattcattcaacaacacaaatgagcacctgctatgtgccggggaccactctggatgctgaggatacagcagcaaacgctgagactctgctgtcaaggaactaagagtccagcatgagagaccaggtgataaatgaacagacagacaaggtaggtgatttcaacagcgctaagtgcccccaagaaaacagagccgggcagtggcacagaaggtgacaaggtgtctgggaagcgggacaacttcagaatgacggtcaaggaggaccccgtggaggaagtgacctttgagctgagactgggaggaataggaggccgcaggcttgaaaagaaatggtggaggaggccggacgcagtggctcgcgcctgtaatcccaacactttgggaggccaaggcaggcagattacgaggtcaggagattgagaccatcctggctaacatggtgaaaccccgtctctactaaacaaactacaaaaaattagccaggcgtcgtggcaggtgcctatagtcccagctactcaggaggctggggcaggagaatggcgtgaacctgggaggcggagcttgcagtgagccgagatcgcgcactcgcgccacgccactccagcctgggcgacagagcaaaactccgtctcaaaaaaaaagaaaagaaaagaaatggtggaggaacattctaagagcaaacggagaaagccaaggtcctgagacagaaatgggcttggggtgtttgaggacagagggaagccaggtgttgctatggccaagtggcagggagagagtcaaaaaagctgaggtcagagccagatcacacaggctcttgaaagtcacaaaaataatcaaaaatagtaatacaaataatataataatcattattattattgctgctataaataagatgccattttccaaaacaccaagcttttctaacttaagaaacaccacgctgcccctctcctactgtttttccactgctctccaatttgtcatcttgctggagtggaaactgccaattccattttagtcgacagctataaaaagaacattggagctggtggtgccgatgaccaaactcggggctaagattagcccaggaggctgtcacctttccttaatgtgagaaacagctgggattccccttccttggaaaacttcaactgttccgccccgccccgcagagcccttgctggccaaatgtccatggagatgggaacggggatgagttttggaaaaaagaagttgagcaacagggattccccctgcagaaggcgtcccgggctgggaggtgagctcttgaggtcaaaagagcaggaccagcaaatgcaaggcgagccccctctctgcagagagccctcagagccagacatcccccgcagagaagcccaccgtgtccctaacacccccgattgtctcttgtcgttaatccaggaactacattcacctgggattcttcagttaggcatggaagggtcagaaatgtatcctcttgatgccggaaacacactagagaattcaaactgctgctcagagcggtgcagtggttaattcaaggatctctatcgccacaaaatgggtaagcctgtggctcagagcagctgaagggtcttcacgcaaaattaacctggttctaagctttttaagcatagaacagcagagtccaaggtgtggggtctagagccaggctgcctgaggtcatcccaccactgccctttatcagctgtgtgatcttcactaagttacttaacttctctgtgctcagtttctcaccagtaaaattgagaaaacagtagtctatcttttgggctcttatgagggatcagattagttagcacatacaaagtgcttagaataaggcctggcacatagttcattattaatgaactactaattactcaattactaataacgttcattattagtacttactactgttttttaatgtctcttggttccatgagataaagtcttacttgtctttgtttttctacagccaaaatataatgatgataataaaagagctaacatctaatgagcatgttcaatgttctgagccctatgcaaagcacccaacgtgtataatctcatttaatcttgcctcccaagagaagtaaatcatcatctgtatcttacaaaagaggaaatgtcagcccagataggtgaagtaacttactcagaacgacacagctactaaatgcagatcagggatttgaacccaggccatccgacctcagagctgtgctggtgaccgctgtgggttacagccccccagatctctcccagcctaggccagcacctggggcagcatgtatcaactgaatgatgactatgtcctgagtaatgaatatcacaagaccataaaaataataacaaaagcacacgcctgtaatcccaaataggaggctgaggcaggaaggtcactggagttcactatgttgaactcactatgttgcccaagagttcaaggccagcctgggcaacatagtgagaccccacttcaaaaaataacgatgaacatcccatgagcactaagtgcatgctgcttatttacatatttaactccaggaaagaaagactgtcactatctcattttacagacagggaagctgaggcccaaagaggttgaatgacaggtcaatgctgaatatcacctgtggacgagtcccctggattctccaagctaaactgtctgcctcccatgggtgccagcttagatgagaccacacacggaaagtggcaggcacagggctgcctgcagacagtggccaataataggagctgtgattattactcttgttcttaacagccaacttttcacagctgaaacaggctctgtgttttcctgccttcaagaggtaaatatgaaatttcttctgaaaccaagagaatagaagctagagaataaatgccattcactcattccacaaatgcttaattgatgcccttggatagcttcagaataattaaactcccagagtgcttaaaagctggctgactcctaactccgtaaggaacttggtaggatccagcctcaaactctttcctgcacagttccatcagcaacaaaaagatttcagtgtaaatagaaaccactcagtcaacagagccctgtgtggctggatcagcccctcaaggcaaagcaggcagaggccaggccttctccctgcaccccactttgcaggacagctcgggggagctgtgcaggcattccaccaagcagatgctgggcctgaactgctgagacgcagaggggaaggcttaaggtgaccctgattctgatttttcctcatgctcttttcctttccttgtctttcctgaaaatttctaagctgtagaccagcagttgttgaccagtggcaatattgccccccagggcaaatttggcaaggtctggagacatttttggttgtcacaacttgggccgcactactggtgtcacgtgggtggaggtcagggatgctgctgaacatcctgcagtgcccaggacagcgcccctgccaagtcattatctgggccaaactgtcaataatgctgaggctaaaaatgtggtatagaccaggggtcttcaatcccggaccacagaccggtactaggcgcacagcagtaagtgggtggcgggcgagagagcaaagcttcatctgtgttgacagccactccccatcacttgcattaccgcctgagcgctgcctcctgtcagatgagcctgccattacattctcacaggagcatgaaccctactgtaaactgcgcttgccagggatctaggttgtgcacgccttaggagagtctaatgcctgatcatccgttactgtctcccgtcaacccccagatgggactacctagttgcaggaaaacaagctcagggctcccagtgattctacatgatggtgagttgtataattattttattgtatattacaatgtaataatcataaaaataaggtacacaataaatgtaatgtgcttgaatcatcctgaaaccatcagcccatctccccaacccttgaaaagaactgtcttccatgcaactggtccctggtgccaaaaaggttggggactgctggtgcagagtcttcttgcctagagcagactttaccttcatcatctctgatccctcaagcaacgctactcctcagctcactcctcaactcactgccacctgggtacgtgtgattcaaatcaccagaggccccccaatcactggactctcaggctgacctcgggctctgtgaccttcatagcactgcctctgctgacccttcccaagtctccttcccctggtctccagggcaccagactcccctggttctcctcctcctgctgtgacagctcctcctctgccacctttaagggatgtggctctcagttctctaagcctccccttctcccactggaggccatcctgggaggtcggagccaattcccaggacttcacctcagatctcattgctgacagctcccatgacaacatctgcagccaggatctggtttcttagtctagaccacgtggccacatacccaccaatctcttgcctttccacagaggtgagatcatggttcatccaagaaggcccatgggtacatgagactcaacgcttccacttccaaaatgaaacccgtcctccctgcccaacctcatccccacacagacctcctctcctgtgtgctaaatctcagctggccaagtgcaccacgtgaacaaaacaatctcgacactcaacctcttccccttccccatccacagcagctccagaaaaacagcagcagcccctgccccttaccgagcacttccggtgctaagcccacttgctctaattcattcagaccttacctttgtgggtaggcactgtcactgtccctgcttttcaggggatagatgatggagagtttccgcaggtgacactgccagtgagcagcagagctgcccgggtggcacgcagccctcctggtggctggccctgccacctgcgttcttaatgcctctctacaccactacgtcccatcaaacctcagtgacatctgccttctaaaccactcccgacccatccctgcatctcccttccccactgccacagccttacttaataccttttttgttatttttcgcaaaggcgtcatcaaacccttttaaaataaattctgcctcttgttatgcttccaactgtgagaatgcagttgtcacaccccggtcacatgtccagcccatcccagaaggatgatttgtgcgagactggaagaagcactctttgcctaagacagtctgcttccccctgccagaagttgtcttactaacgtgtaaactggtgatgtatccaatttgaatggcagccctcagaggaggtgcccttgtacagtgcacaatccctccaactggacaactcacctgttatattctcggattgttctaaggacaataaacaaatagacaaacatcaacacccctttgaagtaacctactgaaatcatgtctgttaaggaaaaggaaaattggttctagtatccaaaataagtgtcccaagttatttgagctaatttccttctaacaacacatttgtttcattaattattgcttaatctgatattttcctacttcagatcagcatcttttctaccacatacccactgaaaaagacaccgatagtacaccaaaggaagaatacacgtggtgaataaacaaaacattatgcgtctcagagcaaggaaatgcaaagtagaaagaagtaccaattccacaatgattcctttttaatttaaaaaaatggcatttctgggatgggggtgaaactatgactgacatgatggcaacttcaatttgtagatttctggaaggtaatttagcaatatgtatttaaagtcctcagaatgactatccaaaattccactgctgggaataaaccctaaataaactaaaaagatatacatatagattcatgtacaagattaattaatcctagaagtataagctgattcactgcagaactacttataataaaaatacaagtagccaatattaattggcttatgctgtacttggcactattataattacgtgacatgtattagctcatttaacctccatgacaactttatggggtaagaaattttaacggataggtaatatgcctcggatcaccaagcaagcagataacaaacccagaatttgaacccaagatatccagggccagagtatgcatgctttatcactgtgctgtttggcctcccttcttgataatagcaaaaagttttaaaaatttccttccttatgtaaaaaagtaattttaaaaaaaggattgagggtgggagataatctcattttctgtcaaaatgacctagaagagttaaaatgtagaatggcacattcatgcaatggcgaatggtatggccatcacaatccctgaagacacgctgagtaaaaagagcagggtataaaactgcacggtgggatctaccccccaaaaccaaagttgtatataataaagagatggtcacttttgcatgattctgggggacagagaaagagctcaaaaatccactgacctgtggtcttctcagtaaacacaactttggactcggatgtaaagttctgccccgtgaggatcatttgctggccgccatagaccaggcagctgtctgtgtcttgtctttcaaccatgggcagctcgtgagcagatcgctgggctgcaggcaaaagagagagaagtcactgtgataaggggagatgtctgttcaaaagaggaggtctgatttcatggtactgagatatgacatgctctgcccacctgtgtcacctgttgttatctaaaatgtggaaccatcacccctgacaatcaatgacgtacaaatgttatgccttgtgaaagtgctctaagtcatttgagctaatttccctctaacaacacatttcgttttcatgaatcaagggacagaggcctgttctccttacaggaagccagaggctgcctgttgtccttataaggagaacaggtacatgagaattggttttctttatccttttataaagggatgggcaaataaacttctttataagaggtttcctttgttaaagcatatcctttctttgtacatttgatgtcagccaaaacatgaaggcatcatgtatgctaagcttaggatatagtacctgaagggtttagacatattgactttggaattcatttatgatctttaacatagtcgttaagacatccatgatctacccatggggtccttttctagaactctccctcattcactctgttccagccacacttctagaacattctgtctctcagatatactcagcatactcctacctttgagcatctgcacttcctagtgtctgtcctccccagttacctgcatgtctcccttctccacttcttgcaggtctctactcagctgtcacctcctctgggaggcttctttaacccaccccatcccctcccaagagttaaaacagcagtacccagcccggtccctctctctcattctctgtcacctttgctttctctgtcctactttgcttttctccatagagcttttcactttcagatacattatatgtagcttgtattggtttatcttctttcatctttaacctactagcatataagcccaggaaggaggggcttcgctttgtgtactgctgtaagcctagaccaggaatagtgccaagaacctaggaggagaacgtactagttggtgggtgggtgggtggatgggtgggtgggtgggtgggtggatggatggatagatgggtggatggatggatggatggatgagtggatgggtgggtgggtgggtgggtggatggatgaattgatgggtgggtgggtggatgggtgggtgggtagatagatgggtggatggatggatgagtggatgggtgggtgggtgggtgggtgggtgggtggatgggtgggtgggtagatggatggatgagtggatgggtgggtgggtgggtggatgtgtgggtgggtagatggatggatgagtggatgggtgggtgggtagatggatgaatggatgggtggatgggtggatggatgggtgggtgggtggatggatgggtggaagggtgggtgtgtggatgggtgggtgggtggacagatgggtgggtgagtggatggatgggtgggtggatgaatggatatgaatatgtctgtatctcccagtatgtattctcaatacatctatttacatctatgtcctcatctatactttaataaatgaaaaatggaggaacaggacaggcctgtgctgagcactaaaccagaatgctatagttgaatgctcatagcaaccctctgaggaaggaagtattaaaatgattcgcatttgactggggagaaaaccaaagctaagaggagtaaagtcaccgcttggccaaggatccatggtgaagcttacatttgaaccctcaaaagcaggtttctccagctccagcgcccaatctcttaggttaactagccagccacctattccagaagccaggctgcagaaaagaatgaaaacctgctccagccaccttcccagggcaggcaagaaacagatcccagccacagccagggccccacctcctcaggcctctctccttccagcgtgggccaagaggccaggcccgccccctggggtgagtcagtctgagctcttggcattcctccccaagcccagagaactgggcagagggccagccccttccatggcaggagcctacggacctccccatccgcgagcctgggcagcaaccgcgtgaggcccacggcccaattctaacccttccctcctgccttgcctgggcctccaggccactggcatccccctgcatctgctggggccactcaatggagcaacgatgcacttggcaacatttcaggagtcgccgtgcaccagccagaggcttccagacactccaccttgagagtgccacccagcagtgactcaaaccaatcccctgatggcttttcccaaccccagctcagcccaggcaccctctgttcccagagacccgcctgccagcgctgccccaggggctgccggctacaaggatagattacaaagacctctccgcagaagctgctaatctctcccacatgggctgggttattaatcctttctttcaatatcaaagttttgtgatgacttcctaattgagctgccacaaatgagatttattagcagcaagagcagcagctgcaggttcaggctttgaagatctgcctttgatgaaactggggagcagctgggggcttttggccccggggatgggtggtgcagtggcgagagcatcccacccattttacaggtggaaagcctgagtcatcgctactgggcaagccagcccaaggcttgcagccaggaggcctggggactggaaggggctgcaagctctcagtgctgggcgggaggctggcgcggacagttgggctgtgaatcactgcacgctgctgtgaacacagctcctctctttcctgcggcagcctcgttgcttcccccttcaaagcctcatagtctcagcaaccaacagattcaacctttgccaagtctgcatttcctacctccctacctgaaggaaaacttttttttttttaatgaaaatttaaagagacagaaaaaagagaaaacacgcctttagctatattctagtactactacaactccaagtgcaggccaggggccttggcatcactggagagcttgtcagacatgcagtacacctcaggccccaccccagacctgcccagcccaggtctgcagttttacaaggagcccatgtgattcttgcgcactatcaagtttgagaagctctgttcagccctggccaattagaatgggaatgggaagttaaaaatactgacacccaggccctcctcgtcctttttttttttttttttgagacatggtcttgctctgtcacccaggcaggagtacagtggtggcatcacggctcactgcagcctctgcctcctgggctcaagtgatcctcccacctcagcctcccgagtagctggcattacaggtgtgtgccaccacatcctgcttatttttgtagaggcagggttttgccatgttactcaggcttgtcttgaactcctgggctcaagcgatctgcctgcctcggcctcccgaagtgttgggattataggcacgagccactgtgtctagcccagggcccaattctaaagcaaggtttctcaaccttgacactattgccatttggagctgggtaattctttgttgtcagcaggcagggggtgtcctgggggtgtcctgggcattgtacaatgtttagcagcatccttgggttctacctatcagatgccaggagcaccctaccccccagctgtgacaaccaagattgtctccagacaaggctggatatcccctggggaagaggggtgcaaaatcatccctggttgagaacagctgttctagagattctgacttaaatggtctgagggtcaggaccccagcattgtttttatcttaaaaaaaaaaaaatcttcaagccaggtgcggtggctcacgcctgtaatcctagcactttgggaggctgaggcaggcggatcacaaggtcaggaaatcaagatcatcctggccaacatggtgaaaccccgtctctactaaaactccaaaaaaaaaaaaaaagaaattatctgggcgtggtggtggcatgtgtctgtagtcccagctactcgggaggctgaggcaggagaattgcttgaaccggggaggcggaggttacagtgagcagagatcacgcccctgcactccagcctggcgacagagcgagactcctctcaaaaacaaaaaaaaatcttcaaatgattacaagaggccacagccaggttttatctgtggtaccatcactgcagggtaatacagggccctgggagctgcaagagaatacatcattaactgctgcttgggctccggggtcagaaagccatggttttgagtcctgcatctgccatccctgctctgtgaccctgggcaagtcacttcacctaagtcacagatgcctcctctgtaaggtcacaacagtacctgccctcacgggtctgcttcaagcagtacaagaccctgcatatgactatatggacgcagtcagtacatagatggtaaaatatcaaatatcaacccaaatggtcatgcatggatacacagataaacaaagcgtggtctatccatgcagaatattactcagtcatgaaaaggaatgaagtgctggttccatgccatgacatgggtggaccttgaaaccattaagtgaagtgaaaggagccagacacaaaaggacaaatggcataggatcccatttatatcaatcggccagaacaggcaaacgcagagagacggagagcagatcggggctcactggggggtggaaattgggcagtgcctgctaatacgtgaggcgtttctttttctggtgataaaaaaaagttctgcaggccagatggggttttctcagcctgatgtcactctgtccgggtccaagttctgtcttcatagtttactagctgtgtggccttcgagtggcagctctctgtgcctcagtttcctcagcaaaaatgataaagtttggctgggcgcagtggctcaggcctgtaatcccagcactttgggaggccgaggcaggtggatcacctgaggtcagaagttcgagaccagcctgaccaatatggtgaaaccccatctctactaaaaactacaaaaattggccgggcctggtagcatgtacctgtaatcccggctacttgggtggctgaggtgggagaatcgcttgaacccaggaggcggatgttgcagtgagccgagatcacgctactacactccaggctgggcaataaagcaagacttcatctcaaaaaaacaaacaaagaaacaaaacaaaacaaaaaaaagttctgcaactacagagtagtggtagttgcacaatattgtgaatgtacttcatgtactgaattgcatacttgaaaatagctaaaatggtaaattttatgtgtattttaccacaataggagaaaatatcctatataagacaaaacagcccatgcttagcacacagtaacaactcaagacatgatggtctttgctatcgttgactttcaaaaatgcccctctttttcttgctaagttattttcacaacactttatttgtttaaacccttaaatcatagccctacagcaaggaagacactatcactcccatctagagaggagaggacagatgctcagagctcagcttcagtgaagggcagcacgtgctcttggttaaggctatagtgttggacacccccctggttgatccttgtaggggttttcacagctctgagcctcagtctccccatctgtaaaatggggctgttaacagtcccacttcacaggtcattacgaggattaaacaagttcatcaaaagcgtgtctggcttaataaacatgggtcagcaaggttagcaacactaaaagctgtagcttctgagaggctgtatgtgccagccatagacattgttgtcttatatattttagcatatatgtaccaaacatatgcatgtgtgtacacaggtcacctctgtggtcactgctgttctcggtgaatcctgagccataacccaggtttcttcttctttttttttttttaatagagactggatgttgccatgttgcctaggctgatctcaaacacctgagctcaggcgatccgcacgcctcgccctcccaaagtgctgggatcataggcatgagccactacgcctggcccaggtttcttgaccccagttgccagtgtttctcaaagtgtggctctcaggtcacctgtagcagaatcttcccccagcaacgcagggtcagaaggtgctagataaaaatgcagatacccaggccacatccctcaccctctgtgccccaatctctcgggcagaggccagacatttgcattttaacaatctttccgggtgacttgtcacgcacgtttgcttaagagccaagttccacacttaagaggccacctgaggacggggaactcctccagggcaggccccagtcctcagagaacccagaggcaaagcaattagcttttgaaagaggaactgaagccagcgcacagcagcccaaattaccctcctgagctctacttctctattgctctctgatgcaacctccatcacctatggctgctaattggggtgacaggtccagggtgggtgggaggctctaaggaagcccagtgggcctcccaggcttgcacccaccctcctcatcagcccccctttctcccattcatttctgagactgcagacaatccaaaccgcacagcctgcagttttccaaccaaaccaggcaccttgcttttaaagtcatctttgagggcctggctcaggcctgcgggtgaagtcttgacctctgctccagcttaagcttcaaggtggcccctgcaaagtgacttccccaggcttccctcctgcccctggattctggcacgtcataaagtggcttgggggggctcttgtattttatgagctctgaatcaacaggacgctgttggtttaaccagtttgggtgttgactttgtcttgcaactgtgcccacctgcagcacagcagcagccaccgcaaaggttcagcgaagaaaactgacaccggcacagggttcccccacatcgcccaagtaggcctggaaatgggaagttattgcctgactatctgaaattcgccgtcaagccgggtggccaagaattacgatctatccaagaacctcaggagagactggttagagaaattcgctcctacagagagggcagtttctgttaataacagcggacaggctgggtgtggtggctcacccctgtaatcccagcactttgggaggccaaggtgggcagatcacttgaggtcagaacttcgagaccagcctggccaaggtggtgaaaccccatctccactaaaactacaaaaaaagttagctgggcgtggtggtacgtgcctggaatcccagctacttgggaggctgaggcaagagaattgcttgacctgggaggtggcggttgcagtgagttgagattgcaccactgccctcaagcctgggtgacacagcaagactctgtttcaacaataaaaataaatttaaatttaagaaataacaggccgggcagggtgacttatgcctgtaatcccagcactttgggaggctgaggctggcagatcacctgaggtcaggagtttgagaccagcctggccaacatgatgaaaccccatctctgctaataatacaaaaaaaaaaaaaaaaatagctgggcatgatggcacgcacctgtaatcccagctacttgggaggctgaggcaggagaactgcttgaacccggtaggcagaagttgcagtgagtcgagatcgcgccactgcactccagcctggatgacagagcgagactctgtctcaaaaaactaaaaataaatagcagacaattacaaatgctataaagactacagattgcaggcacaacatatacacatttttaaaaatattataaaacgcccacaccaagaagcaatttagggttcacacgtaaaagtaacattctaattttgggactttgagcaagacacttaatttctttgcctctgtttttcatctataaaatgggaatatcacagcactaacctcactgggctgcctgcagattaaatgagctaatccatgggcctgcgtggcatctcatcaggactcagtgaatgttagttgtgtttatttttattgctaaacttcatgagaccacaaagcaggaatcactcccgttttagagtagaagacattgatcctcccagaggagaaggaataagcttgggagctcacagcaaatggacaagcagaatttggacctacactgggggattccgctaccccatgggaccctctgcagtgaaacggaggacttcgtgggaaagacaccggccagcccaggcaagaaggttcctcccattggtcatcgttctggcccgagcactgagcaaccctggccttggcgctccagctgctgtcagcccttcttgtctctgtatcaggccccatccttggctgtgagcctggtctggctgggcctggcttggcccagaatgtgctgccgactcaggcatctcccgggagaggctgtgagcagggccagcagacaggcccctcagcctccactctggctgttccctgggtcttccctgggaagtgggagagtggaggggaaccaaaatctcccctagtgtggggctcacctctttgagggaaccactgaggtccacagcaagggagtggggtatgatgtgtgcaaatgcatgagacacacagtgagtgacaaagttgtagctgtgggcctcggtggcggggggcctcagcttcagctttctcatatggagaaatgcagcagcacggcccctcctgtgagactttcctatctcatccactccacaggacatcagggagagtaggagctgctgtctctcctcccatcagatcattactctaccattccaatgtactaacaggcaccctcttcagaatattctcagtccaaaacctgatgagctctggatcactgaggaacccaggcagccgggacagagaaaagaagatggctttaaccccagctctgcccctgccttgccagccgtgggactgcagcaagtcactcatccttcggagcctcagcctgcaggcgcccacaccctgcaagggtgcttttctgtgcctccatcactggcatattatcaaatgcttcgaacaaatgaactgagcaaacgtttaagatgggccttctgaggttatgatgaggatggaaatgagttaacctcagtgcatctgtgggtacatcgtaggtgttcagaagggcactctgccttcccagctccctcataagtagcccagtaaagggccgggtaggtaactatttcaatcagcaaagaagccaccccaatcctgggctctccaaaaaaaaacaactttcctccactcactcatcaggtggcccaccccactgggccagataactattggggttccttcccagcagcagggtatgttgcaggctgtctgctcgactctcctctcacaccggcctactgctgcctgggtttcagactcctgcagtgacagggtggcagccagaggtacgtaaagcctgctttacagaactacgggagggctgcaggcaagacaatgagatccgtccacactgggccaccacaaaggccaccacaaaggaggcacttgagttaccctgtgggatcacgtctggcacttactgtgtgagacacacacgcatttaaccgccaccctgagggaggtactattattctccccattttacagatagggaaagcgaggcacagagtgtttaagtaatctccccaggactaagcagccagtaagtggcagaggcaggatttgaacccaagctacctgctccaaagcccacattcctaaccgccactctaaactgcttctccccatcatgcagctttctggcacttctgaaatagggcttcttggtcacttgccttcgagagcagaggctgacaaaggcctggccaacctgctctctgcccaatgctccagtttcatccaagatttaccactacaggatcttgaaggagacaatctagtgccggggggtggggggatgaggagtggggtgggcaggtgcccacagccccctggaggcccttgagttggtctctgatttataatgagatgatgccaccctttgggtttctggcccaaattaatctatcactcaatatgtagttaaggcttgatgccccgaggctcagtgggatgcaatgttaccactggcttgcccctcactagctggatggccacaggcaagctcacttctccatgctacagtttttccagcctcttctcatactgattcagccacaatacagaacgtacttgacacacagcagatgattaataacttcatttctctacacctcttccctgtcctgtccctctcatcttctttcttccttcattctgccttcaagtattgattagcacctactatgtgctaggctgtgtgctaaatgaatattaaaatagaaatcacagctgggcgtggtggctcaggcctgtaatcccagcactttgggaggccaaggcaggtggatcatctgaggtcaggagtttgagaccagcctggccaacatggtgaaaccccgtctctactaaaaataaaaaaattagccaggtggcctcctgtagtcccagctactcaggaggttgaggaacgagaatcacttgaacctgggagacagaggctgcagtgagccaagattgcaccactgcactccagcctgggtgacagagtgagaatccgtctcaaaaaactatatatatagaaatcacatcatgtcaacctcctacttggaacccatggcttcccatcctaattagaataaaatccgaatcccccagcttgggctcagacctcacctccgacccctcaccccacctataacactccacacagtctccctgggtacctttctcctccctggagaccctgagcttatccctgcctcagggcctttgtactggctatacttccccgtggaccaatcactcaggtcctggtgaacaagctccatcctcacaggggccttccctgatcggcatgacagacacatatttaaccagcctaccaacatggtgatgttgctgttcccgcactcccaagccaccaacccgtggtccttgttattttcatcatgacacttggctctcaaatgctgtctttgcttgtttactgtctgtcttccccactagaatgtaacctttgtgagggcagggactttgttttgttcagtgttgcatccctagtgcccagaacagtatatatcacatgccaaatgtattttaagttgaaagaataaatattgggaagcccacgataatgatgtgagtcatttcagcttccggcaggagcagctgaacaagatgagcatttctgattcacaaagcgaagcacagtcaacatgccattcaggcctccctaattcttttgtttgttttgagatggagtctcactctgtcgcccaggctggagtgcagtggtgggatctcggctcactgcaacctccgcctcccgggttcaagtgattctcctgcctcagcctccagagtagctggggttacaggtgtgcaccaccacacctggctaacttttgtatttttagtagagacggggtttcgccatgttggccaggctggtctcgaactcctgacctcaagtgatctgcccacttcagcctcccaaggtgctgagattccaggcatgagccaccacacctggcccgggcctccctccctaattctaagggtttcctgaagcaatgctgcattagcacccaaccgccagctagacccaggagagtaaagtgagggataaaacggaaggtgtgcaagaagcatcggggtcgtaggttgtctaatcttttgctttcaggaaaaaaaaaggcatcagaaatagctgaatttccacagggaaaacaatggagctggaccctaccccacacgatacacaaaaaccaacctgcacggatcagagccccaaacatgaaaccagaaccgaaaagcttccagaagaaaatgtgacagaatgtctttgctaccttcagataggcagagatttcctggaggaatgcaaaaagcactaatcccagaagaaaagaaaatgacaaatttggcttcatcaaaataaaatatgaatgttcataaaaagacactccctgggctgggcgcagtggctcacgtctgtaatcccagtagtttgggaggccgaggcgggcagatcgcctgaggtcaggagttcaagaccagcctggtcaacatggtgaaaccccatctctactaaaaatacaagaattagctgggcatggtggcagtcgcctgtaatcccagctactcgggaggctgaggcaggagaatcgcttcaacctgggaggtagaggtcacagtgagccaagactgcgccattgcactccagcctgagcaacaagagcgagacttagtctcaaaaaaaaaaaaaaaaaagacacaagacattacctgaaaataaacaggtaagccacagacagggaaaaatatacacaaatctgacaaaggacttatgtccagaatatataaagaactgatgcatattaacaataaaaatatgaataacccagttaaaaatgggcaaatatttgaacagacaatttaccaaagaagatacataggccagacatggtggctcacgcccgtaatcccaacagtttgggaggtggaggcaggtggatcacctgaggtcaggagttcgagaccagcctggccaacatggtgaaaccccgtctctactaaaaatacaaaaattagccgggcatggtggtgggcgcctgtaatcccagctactccagaggctgaggcaggagaatcacttgaagctgggaggcagaggttgcagtgagccgagatcatgccattgcactccagcctaggggaaaagagtgagactccatctcaaaaaaaataaaaaaatagaagacacatagatagccaacaagcacctgaatcattagtcattagggaaatgcacattaaaaccacaatgagatcccattttactctcattagaagggttaaaatttaaaagactgacaataccaaatattggtgaggatgtagagtaactggaactctcatacatccttgttcagagtggactatgatgttgaaaatacataaataaaaacatacacaaccaagtcccttcctaggtcatttacccaagagaaatgaaagcatttgctcacagaaggacttgagtaggaatgtgcatagtagccttatccataaacctaagccccgggaacagaccaaatttctatcaatggtaaataaacaattgttatattcatgcaattgaatagtagtgctcagcaataattaggaatgcattactgaataacaccatagcagtgacagatctcaaaaataacatgctgagcaaaaacagccagacccagaagggtacacactgtattaattccattctataaagttctagaacagggaagattaatcaaccgtgatagaaatcagaacagcgctgcctccgtgtgtgggcttgaggaggcggccttggctgaagggacatggggaacgttcaagagtgaagaaagtgctctgtcttgagtggtggttacgtgggtatatgcgattgtcaaaaatcactgaacacctacaatctatgcaatctactttatcttaattatacctccataaaaatatatatatatgtcacaaagagaggcagagagggaaaagagcatgtgaaaaaatccactttctaacccacaccccatacccactcccaagccctgcaaaatgagcaaagcgaatttacattctgtgccctgagctggcagggctttgtgtgaaattgctttacgtgttttctgaaatacacggagcagagaggcccatctgctgggcagggagaaagccatagtggcttgggcagagctacctggagacatggctggagaggttctgttaagttctcacaggaccaggtgtgtgcctgtggacatctcctgtctcattgcagcctttttctccccactgggcagtgtggaaatacagcctggagaccgtcaccatgtgctgagccccggcaaacattgcctggttccgtctttataggacagagactgacaagtaaattgggctgtcagagcacaaaggggggcaccccgtaccgtgtggggtcagggaatgcttcctccttgaggagccatctaaacaggggccttggatgaggaggggttagccaagccactgaaggatggggaggggtgggctccagatatgcacctctcaaagtccgccccacatcagaatcactgggagacctcggaaagcctccatgcccaggccacatcctgacaaccaaatcagagtctccaggatgggaccaggacatcagtattttttttttttcctgaaatggcatctaactttgtcacccaagctggagtgcagtggtgcaatcttggctcactgcagcctcaacctcctgggtccaagcaatctgcccacctcaggcccccaagtagctgagactacaggcatgcaccagcatgcctggctaattgtttttgtagagatgggttttcaccatgttagtcaggctggtctccaactcctgagctcaagcgatcgtccggccttagcctctcaaagcactgagattatagacgtgagccaccgagcttggctgggcatcagtattttttaatacaactcccgggtaattctaacatacagtcaagtttgagatgctctgggcagaggtgacagtgtgcaaaagccaaaatgtcagagaaagatcccaatgcatttgggaactgaggagcagacaggaagggaagccaacaaatgcagttgaggaagtgtagtgggttacacatagtaccccctacccgactcctcctccctgcaaacttcacatccacccacaacctcagaacgtaccttatttggaaccagggtcttcacatatataattaaggtaagaatggagatgagatcaccctggattaggtctaaacccaataagtgcatcctcgtaagcaacagaaaaagatacacacagagacccagagaaggccatgtgcagacagaggcagagactggagcaatgcagccacaagccaaggaaggccagggagaccagcaggcaccaaaagctggcggggatggcaccggcggtttctcccctgagtctccagcaggaaccaaccctgctgacaccttgatttcagacttctggcctccagaacagtgagagaacacatttctgttgtttcaagccacctggtttgcagtaattgattatgacagcctaggaaactaacataagagggaagcaggcgccagctctacccctgcagggaaagtggagttgaagctgacaacaccgaggaggctgggctcaggcgggaatgaggctgagcaggaggagaggggaactgctccgtgccaagtggagaagggagggcaggcccttgcagctgctgtctatcatgggtaggcttgttgttggggaagacgggggtgatccctctgacctcttccatactccagagaagtgggaggtggggttatctacatggagtgggaaggggtgggggcagcattcagaggctgggagactggagaagggtcaggtcagtcttcctgagaataaggaaaggagcagtcggggaagctggaaggatctcctcggcaatgctgaagccctagtggaaacagaagactggaaacacaagagtgccagtctgtgcaaaagtgagattgcagctctgaccagctggcatgcaaataaacataaggcacctgcactcctaggaaatcactccaccttccaaagagctgcctctggtagtttgttcatgttgtttctgctagcatcgaagaacttacccttgatccctaagacagtacataaaaggcatctccaaagtaaataaattagccttgcaaataagtactagcccacgaagtgtttttctcaccaactcactctccctgtcattggagactctggcttagtcagtatacactgtctaagggtatactgtcattagtaacaatgtattttacaatactctgccagcgcgtgttacggactaattgctaacatgtatttactgactacctccctgtggattatacagtaagtagtcaatacatatttatggacctactaggcactggtctagggaaacagaacaaagaagtaaataaaaatgacagaaaattattagtgagaactagagtggccaactggtagctcagcttggtattgcaagagagggtgggttatgggaaccaaaagaagaaaggatttcatagaaccagaaagttgaagactggctttcctacctaccaagtaaaaacaggtgaatcaccttaccaagaagtctcagtttccttctctgtcaaaagaaggcaggtgaatcaggcaaatgcctttttaaaaagaaaagaaaacaattttcaatgttcaaacagctttctaacaccctgaagatcttgctggaggtacatgtggttaagcgatgatcctcaaagtcttagatcgacataagataagttgccttgagaaacccaaagagagggaggatcaggggctcctgtccccaccttgctacaaaccccagtcccatcctggaacatgagtcatttgccagaaaggggagaccttatctgctcacaatcccccaaatcgctgcaagtttccttccaaaaacatcttgagaggttcaaaaccaagaccttggtggggcagccaccatgaccagcatttgatggacaggagtggggtctactgagctgagcaggagaattccaatatttctagtaatggggttttcaacatgttttcccttggtatctactattgggtctttctcttctaagatcagaatacaagctcaccaccaattcagactgatccacgtcttgactcaaaaggctgaaagaaattagagtgactcttcattcatttccaaagaccaaccaagaccaagttctggctgctctcccaaagaaaggaccatcctctctccttcctgacttttcaccatgaaggctaggctttcccaacctcttctgcagaaaatacgctttccctttgcatgttagtcttcagactatctctgattaacagaagctatctgcagatattttctgaccgcagagcattttgatttttctactatttttttaaatcgggatattttttggtttatttttaaaaaccagaagatttccagcgccagctgatggatgcagcaaagcaccatggcacatgtttacctgtgtaacaaacctgtacatcctacacatgtaccctggaacttaaaataggccaggtgtggtggctcacacctgcgatcccagcactttgggaggctgaggtgggtggatcatctgaggtcaggagttcgagaccagcctggccaacatggcgaaaccctgtctctactaaaaaatacaaacaattagccaggcgtggtagtgggtgcctgtaatcccagttacttggagggctgaggcaggagaatcacttgaacccgggaggtagaagttgcagtgagccaagatcgcaccacggcactccagcctggatcagagagtgagattccttcttaataaaataaaataaaataaccaaaatatttgatcacattgagtctatattcccacgtggaaatactggctgcagttgagtagcagcagcgcatttagatagtgaatgtccccaatctccactattccctgacgtctgccacccaacctaccccattcattttcacaacctccctggcctctgtaggaagttgatattgtgacacctagttatggtaaaatgtccagcaaaaaggaaaaaaaatcctgaaccataatttaatatggaacatgattagaacagcatgaaaccaaatgttcttagaagaaagagactttaaaacaatagaaacagtttttgtttctggaacaatgcttatttttttcttctttcttcttttttttttttttttttttttttgagacagggtctcactctgttgcccaggctggagggcagtggtgcgatctcagctcatcgcaacctccacctcccggattcaagtgattctcctgcctcagcctcccaagtagttggaattacaggcgcataccaccacacccggctaattttgtatttttagtagagatggggtttcaccatgttggccaggctgatcttgaactcctgacctcaagagatccaccaaagtgctgggattacaggtgtgagccactgcgccttgcctcttcttcatgctttctaaaataacttctaaactttcaaacactgagcagataataagtgttgtcacatctaattgcagagattaactacaaaactgtgttaatgtataagtagactttaaacttaggtataaagtacgtaagaatgagctcaaagctactttttgttttgaaacctggtagaaatgtgccaggtttctgctcagtgtccttccaaatggcagatcctggtcacttcgtatcagactccgaaaatcttctgcaatgatacaaccatctgtctgggtgtccttatcctctccagaccgtaagctcattaaggccagagaaagtgtcctgctcatctatggatccccaacccctggcatagtgcaggataaaaaacagacctcagtcaacatgcagagatgggtgcggggacagggtgggggacagggcatgggtgggggacagggcatgcctcccacgtgcaaaagccccagttccaatcccaaccctgccactctttggttgtgtgcacagtttacccccttgtgactccaccttctcatctgtgaaatgggcacactgacaccagctagctcccgggactgctgtgaatactcatgcggagcacttcacactgtgaccagcagagtcaaagctcaatgagtgagagctgctgtggtttgttattgttattgaaaggataaagaaggaaaagaaaaaagggcaccatgcacagcaaactcactccaaatgcatctatcctttaagaccagaatgatatttacacatttcaagtcttctgaatgaagctttaggctacttattggccctattatttttaaatttcctgtgaggccacaaaaccttccagaagtcaatagaagcagcaagagaacactgcaatgtgctctgtctctgtcccctctggtcatcttgggccagtgtaaccctgtgggtcccacacattcccgcaggccaccccgggtacctcgcccagaatacactgctcccgggggaagcccacgtgccctacgctttctgaagaaagaccgggccccagggcccaacttacagcactcgatggggttagatgcagtctgtaaagagacgattctgccactggactctgggatgtgaactcggaaaaccagtctcacccgcgtgttctttcttccaatgtccgtctcgcctttccgcagctcaatgtcggcgtttctaagcttcaagatccccgcacagtcgatgctgccaggatgttaagaaccccattgtcaccaactaccttcaggagcaggaaagatcacccccaaagctgccagtctacagccagtcactgggggaaactgcaatacactcacataagcatttcagccaggaatgtataccaagatgggggtaaaaaatacttaacaaaagcaattagagaaattccccagtgaaaattacttgtctagggagatttttcatgccaactcttctactctcaaaaacatctgaaaaactctatgtaactggggactattgattgtggactattcaatagataagagtagtgaatcaacgtgaaatctcttgaattgaataaatgtactgtgattgtgtatgagagcatccttgctcttaggaaatgcatcctgaagtatttaaaagtaaaagggcataaagtctgcaaatacctctcaaacagttcaggaaaaaacggagaggtgggaaagaaagtgctggagcacaggtgaagcatgttaacgcctgggaaagccgagggggcaggattcaggagttctttgtacacttcttgcagtatttctgtaagtttgaatttattttcccatccaaaggtttttttaaccccaaaatgtgtgcaatggttcccagattttagccacagccatattagctttgtgaatttgggcctctctgcatcatcacttaatgatctctctaggtcaaattaattttttaaatataagtaaatttaacctgatcccatgcaacataacacaaatattcacgagttcttcctcccgaggcacatgaaaatactgacatattatactttatttatttttttttttttttgagacagagtctcactctgtcacccaggctggagtgcagtagtgtgatctcggctcacagcaacctgcccgcatcaagttcaagcaattctcctgcctcagcctccagagtatctgggattacaggcgcccgccaccatacccagctaatttttgtatgtttaatagagatggggtttcaccatgctggccaggctggtcttgaattcctgatctcaagtgatccacccgcctcagccttccaaagcgctaggattacaggcgcgagccaccacgcccggcctacatattatgcttttaaaatggaaacatttaaaacagaaatcacaacgggtcgatggatcacagactgagaactgccatcaacagctgcttccatcagttctgtagagtcccctctcccaaatccctgccacctgccccctgctcgcttctccatgaagacccgccgccctcagctcccagcccttacgttgccctcatgttgtttttgggctccaagggtatctccaggactttggtgttgcccactatcttctcatagctggtggtggtgacagttttccccgtgattcggtgcacctggtagaaggcgtgcggcttaaggatccgctcatcagctgtcccaatgaagatctgaagtcccagaggcttgttttccatgtagccatggagctggtgggggagaaaacaaaatcattaaggtgcggggtgtggtggctctaatccaataaacaaaaaaagaccagagagctcatgggcagtagagagactatgggatttctgcagcatctggaagaatggagaactggaaacaaccttgatgtccagccagagggtaacgcttggataaattacagggatcccctctaatgctgaatattaagcagccactagaaagaatacagtaagtcagaactgcatttatggagaaacagccagaaactgtgcttaattgatgactgagggtggaaggagtgttgcatagtagtgaggataactgaaattaactgcaaataaactgaaaggacaaacatagagctcttgatagtgattgcctgagaagatcagaagaaagaactgtcacttctttttttttttttttttatactttaagttttagggtacatgtgcacaacgtgcaggttagttatatatgtatacatgtgccatgttggtgtgctgcacccattaactcatcatttaacattaggtatatctcctaatgctatccctcccccctccccccaccccacaacaggccccagtgtgtgatgttccccttcctgtgtccatgtagaactgtcacttcttatatgactatattccaatgaacaaagtttgattgtgtaactttaaaaaagagtgtgacaaaaatgccatagtctaagtcaaaagataaagactgaaagaaaatatgtgcaacatataacagataaaagattagcacatagaatatatgaagaatgcctatagtgagtaagtaaaagattccctggccatctatttagaattgaatcctaatcccaatggctttccctatctctctctcctactttttatccagtccaacacactatacattttcttgattccttttgcctaagtctttctcccagaactaaactgtcacctctctgagagcagagatgtttgtctagttaatttgccacaaaatctctagcacctagagtaacgcttggcacatagtaggcattctagtacatatttgatgagtgaattaataaggctatccaacagaaaaaaagtgagtaagatatttgaacaggaaattcagagaaaacaaatgaccagtttgacttctaaacaaacatgcaaattagacagccatgagataccacttttcacctgttagattggcacacatgtagatatttgataatatcaagtattttggagattgtgggggaacaggcacttttatgcaggtaagagcaatatagactggtataactattttaaagagtatcagagcaacagctttagtaaaactacataaataaacactctttgacccagtaattccacctctccatacgcagcctggagaaacactgtatatgcaggagacacgtacaaaaatgtttacaaaaacaaacagaataatgaacaatgagttacatcaatagcctgactactaacaggacatgcctaggctgtgatacactaagaagcactttaaaaaatagtaaggtagaagcctatgaaccgacccagaaagatctaggacacgctgttgaaaaacaaaagcaatgtgtagaaaaatacatacagcatgatacaacttaaaaaaatgcagaatgttttccatccatccagttataatagaaaaaggtgtgaaaggatgtgctccaaactgaccacatcatcacctctgtgaatggagaagaagctcaagattgagaaggtgatcaaagaggactttgactttatatgccatgttataggaaggatagattcctagaaacctgtgaaatatttaaaatatatatatatacacatatatatatacatatgtgtgtgtgtgtctatatatatatatatatatatatatatatatatatatatatatataaaataacaagagacaaaaggacattggtctagagtttgatgatgtgttcctgtcttgtcattgagtggagaaacactagacaaatcatttaatctttctgtgcctctattcctttctccactaattgagtgggactacaggtgacaactcacgaagaccccactcttctctggagatccttcggtaggatctccagtcacctgccaaaaggcaaagttgcagggtgatgaatggttacatatggtctagaattgtgcaatctaatgcaagagccactaaccacatgtatatattaattaaaattaagtaaaattgaaaattcagtttttcaggtacactagccacatttcagtgctcagaagccacatgtggctagtggcagccacaatgaacaaacagcacagacacagaatgtttccatcatcacagaaagtcctattgaacaatgctggtctagaaagatggcatgctcatgtccccttctaaaagccatacaaagagagaggctgggagtggaactgtgctagatgatcaccttttttcataacctgccagacacttacataagtgtctgacacacacctgagaggcggccttgggccaagatggaaatccaagtcagaagcctcttatctgaagaacagctactgtactcagtgacgaaaatcaaaataagggcagcattgagaagagattttgtttttgttgtttttgctttgcatttgagcccaagacaaatatatttcctcatctcctctcctggatttatcaagagttggtatcaagaagaaaggtaggatggagagtgagccctgatgatgtggagctgtttcctcctcaatgaaagaagagcagaaatcgcctgctgggtgtactcaaggtaaacaggcagggaacacctggagataaaaatctatcgtgtccctacagctccatgtgaatccagccatttccatccccgctcttgttggcacacctgcccaagccaccatcaacccttattagagtgaccagcactgattgcccagcttacctctggctggtctttcacagaacagctcgatgatcttttaaaaatgcaaatcagatccagatactcccctgcctacaacccttcaaagacttcctgtggccttatattaaaatccaaactctgtgtgatagtctaagagccttcccacagcccagcctctgccttctcctccaccaccccactaggctcctgccaacaccagccatcctcctgttccctgaacacaccaaggtctttctgacctcagggcctttgcacaagccattttctccacctagaatcctcttccactagcacatttgggtttcagatcttcaggtttttcctgaaccagattagatgcattcagtgctaaagccagctctttaggcattacaagaaccaatcgttaaacctataggaattttaagagccagttgacaccactttggtatgtacgtttccagccgtagtgggaatatttacaccacaaaaattgacaaatgctatagatcagggctttttttttccccctggaaaactggatgttaaacgtttactagcacatcactggaatatttacttcattaacatctgaaatttccttgtttagttagttatttgctgaacacctctctctcctgcctgaacgtgagtttcacagcagtagggaccttgctattttgttagcatggtcaatgaacatttgttgaataatctgtcaccatcaacagtaatacagtgccaggcatggtggctcatgcctgtaatcccagcacattgggaggccaaggtgggtagatctctcgagcccagaagctcaagacaagcgtggacaacatggcctgacccgtctccaccaaaaaaatgcaaaaattagccaggcatagtgtcgcacgtccgtagtctcagctgctttgtggggctgaagcgagaggatcagttgagtccaggaggttgaggctacagtgagccacaatcgtgccactgcactccagcctgggtagcagagcatgaccctgtctcaaacaaataaaccaacaaaaaacagtaatgcagcagtgaaagcatctgtttccctcatgccacacaccacacttgatgttttacacatctcacaacaattccacgtaagatgggctcactgctacccacattttacaggtgaggaaactgaggctgctaaggtctggcaacttgtcccagtcaacacagtgagcatagggcagagccaggctccaaactccagcctctcaggctccgaacccacccgcttccctgccaccctctctctgtcctcagcgcttggtggattccactctgctctctgattactacaggtcagaaagggcaggtcctcaaaggcaaaataagcaagtgctaaggtgcaacatcaagaatgtgcttcctggggccaggcgcggtggctcgtgcctgtaatcccagcactttgggaggctgaggtgggcagatcacttgacgtcaggagttcaagaccagcccgggcaacatggtgaaaccccgtctctgtgaaaaatacaaaaattagccaggtatggtggcacgtgcctgtaatcccagctactcaggagaccaaggcaggagaatcacttgaacccgggggttggaggtggcagtgagccgatattgcaccactgcactcccgcctgggtcacaaagcaagactctgtctcaaaaaaaatagaatgtgcttcctgccgcacaggagagagagtggggcaggaaggagggagaaaagaaggggcacagagggagatggagggagagaaacaaacagcaacctaaacaaacaaaaacggtagttccttgagagaaaaacctctttaggaaagccaagaatggcctctctgagttgaagagcagcctctgggttgagctgggctggcttatacaatgtgagcagatagaatccacctggcactggtgagggtcccttccccgcctccccgggtaacaccagaaagcagtgtggtatagctgaaagcacaaagtttttcactttgggtcagacatatctgaatttcgatgccagctctgcttcttgatggctgtgtgactgtgagcaatcgctccacccctgagtttccatatgctcagataaaaaggagacatcaccccccaccctgcaggcctcttctgaaaggcgaaataaggtgacctttgttgggcaccaaagcacagcacacggtaggtacccatgaaacgagaactttccttgtcatcggaggatgacgcaaatcgaaacagggaggtgatattacagaactgaatggaagggtgaagaatgaatgtgaacaaagtgagaaccaacgtgaaggcctcccatatgggaaagcccaggcactaattgcagtcttctcagtgggctggctcaacagttgccggcttggagtgtcagaggaaagaggggccaggtgaagaaacctcaccatctttcatgaaaggaatacttcccgtccaccctccatcctcccctcctacaaaaggtacagaatgtgcccagaatcccaactgctcagctgcctcattctggaagagccttcctcgccaggtccctggaggtttgatgagaagaacagatagccatttacttgcttctccaaaaactcagtgatttgggttttgcaaatagaacttgatgttttgagatgacatgatctacccttcaggttccaaactccccaccatccccattttcgggagacctcggtcaggaggctttggggcggccttttcaggcttctccaaaggtgaggtcttctcggtggcctggaccagccggatcacactccaggcacagcagacacattctgcaatacaggagctccacgtcactggcctcccgagcaaaggaaacgccacttcctgcagccaaggtgagagcgaaagttttctgcttcttgtaatttcccaggcagttgaaaaggttccaggaagaagcagtgcttctagtgcacaccgtgaagggctgaatgcacgggaggggagtgtctgtggcgtctgcgggggtgggggcccaggctgcagcttggtgcgacttccatccaccaaccttcccatcaaagggacccaagaagccaactgcaggcttgggggcatcattctattaataatccactctgtccccttgtcaactcagctacttgaaaaaccggatctgaggaatgacgtgtgatttagacatcccgccacagttagctatataaatgacgccatccaacctcatcacaaggaaaactttgcaccctccataggtgaagacctttctacacagtgtattgggatcgcttgcaaacatagctaatgtaatctccataacaatgctcagagaagagcagtgttatcccatttttagatgagaacggtgaggctcaaccaggttaactaacttgctcactatcctacaggtcataagtgatcaggtggcaacagcctccactggccctgtttgtttcttctgttgtatggctgattcctgattcagaaaaaggcaaaatccccccacccccagccccccaagtctggcctatgcattttaagacaggcaaatccaccccaccagctcagcaataagaacccagagacacacaaacatggcctccacgtgtcaaagaccctcagcgtcaaagagaaagttattcagactcacccctgcctgccaccaaattcaagatctgcctatttttagtggcaacttaactgtcctgatacaaagataaaaaggcatcaatatctgttgattcttgctgttcctttttttttttggtgtaaagtactaagagctcactcattgcaggaaaaaatagacaagataaatcacaaaaagaataccccttgaaaataagtaagcatttgagtgtacatccttccaaacttttctttcattccaaactgttttattattcattttatttttcctcttaattgacaaataacaattttatatatttatggggtacaatatgtgatgctttaatatgtgtttacattgtggaatgattaaatcaagctaattaacacatccatcacctcacatacttattgtttggtggtaaaaacacttcagatctactcttagcacttttgaaatatagacaatgattatttactatagtcaccattctgtacaagagatcactaaagcttatccccctaactgaagttatctacgctttcagacttttcttccaggcacacagatcaacatattggcattcgagtttatgtactgtctccattgactaagatggtcatgtcctcttgtcattgaatcttgctttatgagaatctcaaagaactacatggcacatcccagggttcggactagcccaaggccagtgaggtccccaggacacgcgatctgagggggcattcactatcaaggtccagcaaatgcaaggtgggctcctgagagtgagccccactctacatttggccccctggtgcctctcttcccgcaacccagccccagcccttgcgtgcccgttctgcctgtggatccctgcagccaggtgcgcatttagatggttcccaactttcccccattacaaacactgcaataagaacccttgcaagtggcacgtctctgaaaacgactctgctatcaactctgctcagggctttttaaatactctcagttggacgattccaatccaaaatgtgagactgattttcaaaatggcaacgggccaaacagttttgaattttactaaaataaaacattaacgatgttaagtagcattttgttgaatttgaaatattaggaaattgctatcatcctcaaagatttcactctgaaagaaagaaaaagcccagggtgggggagaaggccgagcgggagggtaccggggaagaggactgcaattccccatggccatgcagcacatggggagaaaatttttacaaacacacatggatcccaattcagtatctattttggggtgctaaagttgcagcacgtacctgccatcctaaccccaccttccaccctctcccccccaccacacacacacacacagacacacacacaagcagaccaggcacacttcgtccatgacttgactctcacccattccaacaagccatgactgtgtgttaatcacttcaataacaaccctaactcttggtaactctctctgcctccatcccatattagatccatctcaaagccctgtcaattccattccctaaatcccactcaaatttgccacctgtgactctccatcacttccactctagtgccctggtcaaagagggggcccagtctccttacccacccctctccctccacctacacacagtcttcttcacatagcagtccagctagaaagatccttaaaatggtaagttagagcttttgccacctctgctaaaatcgccccaacagcaaacatcttccttgcatcaaaaagcccgagtccttaccatgactcagaagatcccatatgatctggccctgcttctccatctcccacccacccttcttccctccctgctgccccccatgacagccacactggccttgtcaccctcaagagagccagacacccaccaggcaggtgcccgtccctgcatcccaacacttatcatgccctcagcttgaaatgctctccctccatgacctgcagggctcaccccactcttcattggaacctgtcctcaggtgacctctcatcagagaagccttcccagacagccgcaccccaatgtgacaccccacgcccttcccactgtccctccacacaccctgccttaagttgcatcatccacctgacgcttccctccacctgaccccacatgtgatagttatttgctctttgctgcctccccactagaatgtcagtcccgtgggggcagcaccccatctttcctgttcatggtgcagcctcaatgcctagagcaccacacaggtgtccaacgagcgagcaaggctagaaggaagagtctgtgacatcatgggaggggccggagcagctgcagtctctccagacctacgcctctcccatgacaaagagctgttatacgcccacaccggcttctctccagcttgggcaattctcctcccggcccacagcgaccattgtgtcacagagccttgtcctgctcggtgtgggcacgactcagctggttggacaactggtacctgggctgccctgttccgaacagaggtgacagcatctccaggtatgatgaagaaggagccctgcgcctgctttctgacccagctgggatcccactggctggatgtgtcttcagtcctgcaggaggccactgtgatcagccgccctgctgatagtggcacattttgaaattacacagggaaccataaaaagaattagacattctggacaggcttgaaaaccaaacaagtcaggctctctcagtgttctaaattaagaatcaagtcattctatatttctcacatcactgaaaattaaaaacagacatatctaccgcatagcaagcacgctcactcaagagagacttgatggcccgaaacatgctagatttgtttccaattaccatgtccacatttgaaaccctgaggaagccctagaaaccagtgtggagagatcagagacaaggcacattagcctaacaggactcaggaccaaacgctgcaccccagccccctctactcatggtcccccatggggtctttaaataaaaaacctggatcattttgtcccttcctttgggggctggaggcatgaaccttcccttctctgctctcagctgcccctctccactctcagcttccagcttctggtcccctggacagagatgtcaacccagccacgggctccctaccaacattcccgtccccaccatcatataggagctgggtctggaagtatgggattaaaatatgcaagccttctttgagttgacctttgaagttgggctttttcttgttgattttttttttttaagaagccatacaagtgcttttcacatcttctgtctatattcctcttgcgcagaaccagtgtaacactgagatcaagagtctgagccctggagtccaaccatctaggtttacatcctggcattggcacttaatgtgtcatggcgggaaagttactttacatctccaggcctcagtttcatcatctgtaaatgtggctcctgaccctgcacacctcactaggctgttggcaggaacaagtgggctgtgtataaagcatgtcacaagcaatcaatattaactttcattcatattttttcatctatggctgggtgacttgtggcaattaagggcctcttttctggtctcagttcttggaagaaatcatcttgaaggttgtctttcagtgctaacatgtcatgatcttcaggtacatttagaataagatccaggccaaggagggtggattctttgaggccaggagctcaagaccagcctggccaacatggtgaaaccccgtctctactacaaatacaaaaatgacccgagcgtggtggcgtgcacctgtagtcccagctactcaggagactgagacatgagaatcgcttgaacccgggaggcagaggttgcagtaagccaagatcgtgccactgcactccagcctgggtgacagagcgagacactgcctcaaacaaaaaaaagaagaagaaaatccaaactgcccattgcagccgacaaaactgcatgatcagacccccgcccatatcaccagcttcatctccccaactccagtccagccacaggggcctccttgctgctcctggaacaagccacgtttctgccacagggcctttgcatatgctatgcccttggcctagaacattcttcccctgggtcttcccacagctggttcctcctgatccttcaggtctcagcctaaatgcagggccctccctgggtagcctggcagaaagagagctcctctagcatcattccaccatgtcttcctgtttatttccttcctgactgtgctaagtgttactttatgtgtttgcttattgcctgttcccaccccccgccccactagaatgtaagcttgtccatcaccatgcctcagcacctccgacggtatttggcatacagtagatgttcaataaatatttgctgaataaataaacgaatagattgattctcaggttcctatgtggatccacatattgccgagtgattcattctccagcgactctgagaaaggaggctcattcatgtctggaacagaatccctacgtttggagtctgcctaagctcactatcatttgagccagtctgcaggaatgtgtctcaccatgaaagagacatattataccaggccaattacactgaaagtcagaagagcagactaacttgggctggaaaaatgaagtttacaatcttgagattgaattgaaagcacagcagcctggcagctcatggagatggcgagggaaaagtgaggcatgcgcagtgctccctgctgccaagtgtttacccgaagaccagaacacaaggggaaagcatccttcagaaacatttctcccggagtttctcactcaggacactgacctgatattaggaaacaaggtatctactatctgcagaggcctgggctctgggagaagcaggggatccccaagagacggcaactggggaatgcagcttgcagaaactccgtgcaagcatctggccctgaccgtgcccagcatggcagtgtgtgaatgccccagggatgctgggatggcagccgcttcagaacacattgataagacattcctctgcgggagccagggcagagagactatctggataaagagctaatgcatgcagggcttaatacctaggtgatgggttgacaggtgcagcaaaccaccatggcacatgtttacctatggaacaaacctctgcatccggcacatgtatcccggaacttaaaataaaattaaattaaaaaacaaaaacattcccaggaaactgcagttcagctttgaaaaaatgttccaccagagacatctggatgagccataagctctggcctctcctctttcactacagccacagctgaaaaagaaccccaagatggtgaagaggcaaaagctagggctgaggaaatgcaggacagccggccgagccagccatggcataaaaaaggtgagttattcccaatcgaatgacacctccgcccccacaccaaagactgtgcaggtctctctggattcagaccaaaaattctgagtcacttttgccacaagggggaaaaaaaaaaaggagaaggcagacgtgatgtgtacctttccacactctattttgggattttaagatccagtttctttcatttcaaagggtgggtttttggagggctctctgcataactcttagactcagcacggcgagacggcgctgagacgggctctgtcggtgacctggggagaggcgggacccactggcagatcaacaaaacgcatcattcaggaacaaggggcccgttcttatgtggagcgtatggggcctggcttccataaacatgatggaagcctgtgggctgagccagtctgactcacctcttcatcggggccgttcccaagttcattcactcctccgtttagtcattcacgcagcaaagtgcctctcaggaaagaagattaagctgaaggctgtccttcaggattattaatacacattcctttggtgaagaatcgggtgcttctctggatggatggtaacatgtgggattatcataatcccagaatttaagacattggagtaagaaaccagtaaatcaggatttctcaaccttcgcactattggccagtgtggactattgatttgggggccaaataagtctttcttgtcgggggctgccccaggcattgtagggtgtttgtcagcatcactggactctacccagtaggtagcagcagccacccttttcccaactgtgatgcacaaaaaagtctctggacattgctaaatgtcccctgggacacgaaatcactcctattgagaaacattcttaaattaagctaacatttatgaggaggggaaacagaaaatctgcactgaaaccctatcccttgtccatcagaaagtgttgttcaacgggaccttcaagaaacaccccagatcctcccacttttcacgttctcatcaacctccctgggtcccagcactgtcatctctcacctggacccctgcatccagcctctcgctaatttctgccttgtcccttgtccctatcctgaatagaatctccacaagcagccagagggatcttttaaaagcaaatgagatcctatcacttccctacttaaaatccccccatggcttcccagtgcataaagaattacattcaagctgggcgcagtggctcatgcctgtaatcccagcactttgggaggccaaggcaggcggatcacttgaggtcaggagttcaagaccagactggccaacatggcgaaacccccgtctctactaaacatacaaaaattagccagacagggtggcgggcgcctgcaatcccagctactcaggaggctgaggcaggagaatcgcttgaacccaggaggcagaggttgcagtgagccaagatcgtgccactgcactgtagcctgggcaacagagtgagactgtctcaaaaaaaagaagtgtgcagatgacttgcagaagagttcctgggaggaagctcaccaagatggtgaggggggcccctttggccctatctccctccttccttggaattccagtgcttggagtatagaggtggtagctgcagccccagcaatcattttgaaccctgaggtgacctggagttgaacaggaggtaagaaggaacccagattcctaatgacttcatagcactttggactacccatctctagattttctacattcttagatgagaagcaactgttatttggggttttctgttagaggtaattaaacctaagtctaattgaaggactcatcagcccatcagcatcacatcaagtcccccactccttcattcaacttcttctcaactgcattgcaaagacagtaagacaaccatgtctaggcggcttctggttaaacaaactcaaggtacaaatggcacatggatacgtgcaccggcctgctttaccaaaggcttcaaaaacaatgatttctctgaaaagccagtgccaaaagagaatctgaaagaaactgccatgtacaaagagtcagatgattcaactgctcagaaacataccaagtaatgacacccaagtcagtctgcaaatgttctcatcctcttactcacaatccaaaagaacgtctagaaaggtattcccaagaggagaggtgaagtggggaaagacgactgtctgacacacgcaggaatgacgatggtcctcactagaaataaaattgctgcttactttctgtctggtttccgaattgctttttcctggttaaaaggtgccaggcctggcagctttctaaacatttaaaattcaattcaagtcaacaaatatttgttaagttctgcctattcacaaaaagggccatgctggggaaaactggataatagggagatgctataattaatcataataacaacaacaatgacagctaataatgtattgcgtgcttgctaaatacagggcattgtgatgtatgatatctatcaatcttcactatgatatctatcaatcttcactgcaacgctatgagagaggtattataattttaaacaagagggaactgaggctcagagaaattagtttgttcaaggtcatgcagctaagaagagagaagccaggattccaacacggcaggtctacctccaagacccattctcttgacaactatacgatcttctgttcctgtagtctctaaagagggaagaatacacagccacaaatggacacaccactgttccccaacctcagtcattttccagccttattcctgatcttctactggactgttggttactgaatctctccacaatttaaattcatatctttacttacagaaatttatcttgaaagaaactttatgttgctgccataaataggaaaccaggatcaccagcaggaaatcaaatgtgtgcataaatacacaatgaaataaaggtgccattaaaataattatagcagctacacacggtggcacatgcctgtagtcccagctacttgggagagtgagacaggaaggttatttgagcccgggagtttgagaccagcttgggtaacataaaaaaaaatttaaaaataaaataattataaatgttaaaaatgctgactaagtaacacaacattaatcaacatgctcctttcccagggaaccatggtttgcagagcacaggactggcattcaaagtacagcagaggaggtgctgaagcactgggtttggggagccccaagatgggaagccaccatctccaaagccagtagatcatcaagggatgattaagaaaaccacccaggtcagtgcccagacacaagaggtgctcagcaaacctctgcaaaaggacccaaggaggtctgctaaggactctttaccaggagagaaaaagtaccactgcctgcccacaagctaggagaatgtcctgtattcagagagaggactagaaaaggaaaatcatctcctggctccagggcacaaatttttaacctttttttgcaccaatgaccccttctgcagcttggtgaagccatggccctatctctgagtgattcttccacatgcataaaatggacaaggttaaaaaaaaaaaagaagagggaaatcaaccaatgtataaaaatgtaatgtattttcccaaaactaaaaagtggcattcgttcaggtagcccgtctgtctgtcttccttgctctgggtttgcatgcgctgtgcctgtgaggtatgcaatggtagaccaggaaatattcaacgaccagttctccaagacagaaagcttgctttgcagtgtttgcccatttccacggtgtcaacactcccacagtggctgatttccagctcccggtgtgacgatactgtatatggagctgggaggagaagtgcagcggcaccattacgtgctacctccgccatgtggatacacggatgcctatgacctcaggcacataggtcagaacaacatgtaacagagttcctggaactttaaaaatcagctctcacaaggccacgaaaacgggctccaggacactcctgggcacccataggtctctgtgtgcatctgtttaggtgcataactactcagattgcagtctgcccatctcttactctcttctcccattgattttcacatctgctcgttgagaacagccccacccccaccaacacacacatacacatacacacacacacacacacacacacacacacacacacacacaccccttgccccagccctactccctgtgaaagcttatgaggaccctgctatggtctggcctgcacacacatacccccagccccgcgcccccggagtgccatgaacaccccttgttcactggcccgggctccccttagatctggagaaagccgcatccctgcacatcccagaaatgcgcaaatcctacaaaccaaatcacctcggccccaaggctcctagagccttctcgccccagcaggagggagagcctcatctttaaatcccatcacacacatcttcctgtctagacgaggtccctggctgccagggcctcagagtgaatggattcacagcctccacccgctggcaccaccgagccccgccgcaccccgccgctattctcaggacgacctgggcagccccccagcttctagaaaagacacagaggagactgcgcaatcaacaggcaggagtgtgcgtgagtgcggcatgacatgggcacgccaccccagagaagtgggcgcctgctgcgctaaacgtcatccgtcatcctttcgctgaaaagttggaaaacaaacaacaaaaaccccgcccagcctcatttaatgcgaaccaaacacaaaagccacaggggaaagcttttcctctctgtgcttcccttttccggccgaggaacaccaccagccaagataaggggactgtgcggggccctctgcgcggcttcaaagggctggcacccgcccgggcccgctcccactcccactggctaatgggctccccgctccagcccttggggagcaggaggcggccggggctccatgccaggcgacttggaagaggtttaaggctcacgccacacaagggaggaagctcggcctgtcaagaggcgtgataaagcagccccttatcgcagttttcctttcaactgcctccaagtgagcgccggccggggctgggcctgtcaaggccaagcgtgttcctttcatgtcgccctgggttcctcggtcagcgacgtatccacgggctcatggaactgtagcgtcagcattggagtttgcagcttggggccagaggctccaggaggatgcgatcgtgtgcctcccagcctgggcctctggtgaaccatgtggcatctgcaaatccactagaaccatctgggtcccagttttgccatcaggaaaccaggagaagaagattccagagcagtggggtccaacagtttagactgggggctagggagtcggcagacacaagctcaagtcccaactgctgaactcgctggctgtggaccttgggcaggtcactctgactctttgacacatgtgtcacatagaaaaaagcacttgtacatttcatagagttgccaggacccaatgaattggtataagcacagctcttagaaccagtggcgacacatagtaagcgctcagtaaacgttggccttcatcttgttgtaattcttgtcgttttctcatggggctgttatgggcatagaatggggattggcgacctcacattgcaactgagtgatgtgaaattgacaacatgctagagaaatgattttgatcttctaggcacctcccatttacagagggaatgtcccagactgacacagtgaatctacgataaaagaaagcctctcattacttgagcacctttccaccccgactatgagtctcactcaccggggccctggattcagatagcagctccatctgaggcccctcgaatgcagcagacactggttcaacgtcaccgcagggaaaccccactgggcctattccctgagaggcggggcatgctgagagacaggaacagagtcgatcacattgagagcagcttggtccctgtccaatcctctcatcagtggcaacctcagcaccatgtccccagagagctgctccccactgtgatgggcatcaaacgcttagcaaagagccagcccggaacgtgacacccttgaccatcagcctgctcagaaccaaccaagtctcagatccgagactggttggggctgcggaaagctggccacacctctgagccctcacctctgcaaaggggaaaataacagatgcccatcccatgccccatgagctgtggcaaagattagacgatataatgggtacagtgcctggcaaagagtgggtgctcagtgagcgtcaacagttaccatcatcgccaccatcgtcacccatttcagaccttcctccaagccatctcaggcagctcggtcaccgttactttgcttggttatgagtcctcttttgaatgtggacatgaggaaggacaggaccccagtgctcccctccttctccacgcggagtgggcaccaggcactgaatttccatgggtttgctcagagaggctaagtcagctgcctaaggtgtccggcacagggcgggtgccactggaaatcaaaagcaaatctggcggcttccctggctggtggcttttctgctacacctgctcctcctatttcctctttgtttaaacatttttattttactttcaagtggaaatgcggcacacgtcagtaattccctcacacttcgctcttgaggggctccccactcctcacctttatttaaggccccaaggcccttttcttctgctactactacgtgcaggtctttgtgcacagagtcagcatcctacccttgcccagagctgaacacggctccatcctgaatcctagggctgagaacccacgcgccttgagggactggcacttggcttccataaacaaggccgcggctcagtcatctcacagcatgggagaggttctcacctcccgtggcagagaggtgacaggctgagaagccacagtttgccaggaagaactttttgatgaaacaggaaatgaagtttgtcgtaagaggggaaagctcaactctgacttcttaaggattattgaatccccggtaaaaccctgggctccagctctgaggtcctctgtccactgagaaaagccactaccaaggtgatggtcacatactgtcctgaacgtgactgccagctggtgtgtccccctcctgctagtcatccacacttggaaaggaggtcagcacagcccccaagtggacacccaatcccaacatgggcattgtgctacagcaattgcctccaggtgggggcaaagtaagaaccaacccagctcagcagagccagaatcccagctagaccctaaacctcattttattttttttctagacagcttcccactcatcacccaggctggagtgcagtggcaccatctcagctcactgcaacctccgcctcctgttctcaagcaattctcccccctcagcctctggagtagctgggacaacaggcacgtgccaccacacccagctaatttttgggttttattttgtagacacgggatttcaccatgttgcccaggctggtcttgaactcctgggctcaagtgatccacccacctcagcctcccaaagtgctgggattatagacatgagccagcacacatggctggaaagcctcctttcttaaaaagacttgtgtgaccgcatattcacctcaaagagaacacagcttctccataatttaaaggggtgagggggacacattccatcgtaaatgcccaagagagaacttgttgatgtgtgagtacagacagatcatctgtcctctctggggaactgtcttatccagttctgaacctgggttttctttgatgacagaaggcaaataaattctacagcactcatttttagcaagcatggagtttgccgggaccaaggaaaattgactcactccctcttacaaattcgtggagttcaattttgtcactttctgtgtttgaagccaatagtaaacacccacatgcacacccccaggtgtaagagagctcacgtcccatgcactggctgggtctacatgccaccatgccatctgaaggggactctaactcacacctcaatcatccctcctctgtccctgtgggaaacctgtggatcagagcggactcccatttttcccaggaggaggatgctaaagtaggaaggtaaggccagctttacagtcgggagcatcttttttatattaaaaagaggccttgagcaaacacttggacgtgaaggtcagcaagatctgggtttatttttctaagcatttccaaagcaggttccaaacccccacccagggtcaccaacaagatgcccagaggagccaggtgaggaatgtgggtgtgtgaactgggcctagtggtgctgagaccccatgcgggaggcagatccagtccaaagggaggatcgaagcgcagctgttcacaacttgccatgcaggaagccagccattgttgccagatcttctgattgttagaaatccaacttggtatgagaaatttcctaatttgtaaatgttggttaactagtgtcagctgctgcttaaagccctgagcgtgtcaaatgccatctgtggacaggctcaggtcttgagcaatcagaaacagagttccctcacctctgcacacccctgaagcctggaccattcttcctttacatcctgcaaccaccccccgccccccactcaaatgtcacctcctcaggaagctgccccagattccctgaggcaaagtgaaccttgtgacccagagcctcactaccttctccttcttttatagtccttatctctctattataggtcttatctctataaacaaagaatcactaacattaattggacacatactgtcaggccctctgcttcagtatttatggtaacctctttttggggtactattatcatcctactttacaggcacagagaagttaagtaacttgcccagggtcacaaagccaataagtggcagaaccaggattcaaacccaggtcatccggctccatctttcctgctattctttgttcaaccaatccccttgtgacctcaattattttcccgtctgtttctcccagcagactgggcactccctgaaagcaagaattgatctcatttctccctctatccagagtacacagctcacattcagcatctgttgactgaatgggcattgctgcctatcctggctgccgcgacagccctggaaggccccaggcagggtggcaggggctagaatccactccattctccgcagcttaatggggttctgcagagggcttcaagtgatgctgcaaagccccacactgagaaatgtcactcccatcctggccctgagaggggacaggggcttggttacaagctgggactagcacccaggttactaacaagtcccaacaagcttcccaaagtctaacttctaccaaaccaggcaccctccgaggctctgtctctgcccaaggcaagcgcagcaatgtgtctgcctcacgacttcaacaacttcgggtccaaagtcaaggtgcacttgggccaatcattcttctccctcccgcagcaagaaaaataacaatccaccaaaagataaatgcaaaaagaagatgcacgtgagaacgagtccacgtggatgtgtaagcacttgctctagagacatagtcacggggttgctttagggccagtgcatgaacttaatatgatcccatttttgcacaagacttttctgcatttttcaccccaatattacttggctgaaacccccggtccagccccagaccacccttgttcaatccctgcaaacaaggccacatttgggtactcatggcttattccacgcctccccccatgatagacgttcgcctgagcccagcctctgcagccaccgccttccaccaaagcagatccttccccctcctttgctcacggaggagtgagggggaactgctgagaggaggggcagattggccagggagggggcgattgagaacaggaagaagatggggtgagatctgagaggcacgctttggacacaataaacaagcctgctgccttgttcagaaagggacccgggacccccaatcccaccagagccctaaaagcattagttcaaagttaaagttagatacacgcaaagctgcagcccccgggggaactcagagctcaaaaacaatactctctttgactcaaaaaccacaagggaacacccacggcatacttcttgattaaaaaaggaaagtgaaaaataaggttttctttttttccttcttaatcatcataaaactaacttgtgcctattccatcaagtcacgacttctgttggcctcaagcgagcccaattcatgttggccacagacacgaggggccgggaagcttgggcatgtcctagtgaactgaaccggtccttctgaatggttgtcatttccttcctctgcttcctttagcacaggaaagccaccaaggagccgcctacgccagcacatccatcacccagactcccagggcactgttcatctgagaggccagacacagcggggctcaccaaagcctcaaagcagcagcaacaacctctcaaccgctgttcttgagatagatgaagtacctactatgtgacaggcactgtgcttgggactggggatgaagcaacgatgaaggagatgaaagatgaatgtgtggcaggggggtggatgagtaggtgggtgaaggggttggaagggaggaggaaaggaagagagaacatatatcaggctatggaaaaaaagaaacaaacagaggccaggcatggtggctcacgcctgtaatcccagcactttgggaggccgaggcaggcagatcacttgaggccagatcactggccaacatggcgaaaccccatccttactaaaaatacaaaaattagccaggcatggtggcatgcacctgtagtcccagctgctcaggaggctgaggcatgagaattgtttgaacccagggggtggagcttgcagtgagccaagattgagccactgcattccagcctaggcaacagagtgagacttcatctcaaaacaaacacctaagtagaaagacagatgatggcaggagagaaaggggatctattttggtaggagaatcaggggaagctgctttgaggaggtgacaattgagctgacagctgaatgaagcagagaaagtagccatgtggatagctgggaggagtgaaaggcacgtgcaaaggccctgaggcaggagcctacctggagtgtttgaggaatagcacagaggccattagcaggtgggaatggagtgagggagtgagtgagtgaggaagagaggcaggcagggaccgggtgacacggcctggtccacggtgaggagcacaaggctactctgcatctatactccgggaggggagacacaggagggctcagaatgggggtggtgtagaccaaggtacactctgaacagatcctctggcagctgtgtggggagcagatgaatgaagggtgcaagtggaggcagggaaaccagttaggaggctgtcacccagacaagagatgatgctagcttggccccaggtgacagaggggaggaggtaagaaatggttgagcaccctaccccgagcccagctcccacacagatgcacagaactgtgaggaaggccaacaggccaactggatgcccataaaagatcacaaggcaaagagaagcagatgagaaagagaaagagattcaaaatctaaaacgcggccgggcacggtggctcatgcctataatcccagcattttcggaagccaaggtgggtggatcacttgaggccaggagttcaagatcagcctgaccaacatgatgaaacccgtctctaccaaaaatacaaaaattagccaggcgtggtggctaataccagctgctttggaggctgaggcaggagaatcgcttgaatccggaggcagatgttgcagtgagccgagatcgcaccactgcactccagcctggatgacagagcaagactccatcttaaaaaaaaaaaaagaaagaaagaaagaaagaaaaagaaatctaaaacacttctgcttcctacctgtaaaagctttacctcaggcaagtcacatttctctggggctcagttttttcatttgtaagatagtagaacccaattcatggggttacaatggttaatgcaagtcttctcttaatgtctggcctattgtacatgctcaataagtaatacttttctaacctctgcctttaatgatctgagtcgtggctctgccaatttagttgctgtattatctttatattaaaatttcatataatctctctgaacctctatttggccacctgaaaactgatcatgacagtacctaccctcaagtactcagtatgagattgaatgagacaactttagtttagcaaaaggtctggcacgtaggaatccctcaataaaatgataaccagagccctcagtaaaatggtagctgaaaccctcagtaaaatgatacatgaatcagacacaccagtcatccaactagatgatttctaagtctccttctagctcaattatccccaaactctttaaaaaaaatttttaatagaaaaaatgacagcttaacagcttcaagtccctgaatgaatcaaccctggagttgcaagttaaggcaacccaagttgaagagaagttggaactcccacctcaaagtgaacaaaactaaacataggcacttctacttgggtgatacctattactctgagtcatagaattaagtaagtttagaggtaggagggaacttacagagccctacccactcgttttagggcagaggctcctacagctcagtgagaagtatgtgggctgaggttgcacagcgaggctcaggcagaagaggaagccaagaatgctcccacccctccaccctcaccctcaccacccccccctccacccccaccctcaccaccaccccactcccacctccacactcaccaccccgcacctctaccctcgccctcaccctcaccaacccccaccacccccaccctcaccaccaccccacctccaccttcacactcaccaccccgcacctctacccccacactcaccaccctcacccccacccccaccctcaccctcccaggcagtctggtcagtcagagggtgagaaggaggaaccaacaaaagctccatccaaaagaaaggaaaagaatggagtgggaagtgttttagactagcagaaacacctttcttgctatcagagttcaacacaaacaccttaaggggccaggcaagtaatgaaaatgagctggcaaccagtgcaaagactgaggaaccaagttcccaacctaaagacactcaaacacagatggtttttctctcttaaaccattataccaccagggccactcactgctggcttgtctggcactttcatgcagcttcacagcagacaacacttcctctatacctttggcaggtatgcgtcagaacactgtcttaataaacctgcaaatgtgaatggcaccctcatgatacacacagctgttgtgccatgcacagcctgtgcaactgtatccagtgacacacagaagatttccctgggttatgagttggggacctctatctacattccatggtcttataaaaggcactgaaatgccacagggaagctgacatggaaaccaaaaacctcattcaccatcaacacttaactcctgaatcagactcagctggctccaacctctgtactgatgctcaaggtggacaccaagcaagcttctgcctcagggcttcagcactggctgctccctttcctaccacgctggctcccaagatagcaacacagcttattccctcactgcactcaaaattccattcaaacggcaccccttcaggaagttcttccctaaatagcatcctcaccacttcccagtcactttccatcccccattcctgccttatttttcttcttatagcttttttacaacctgacagattgtggaattactgatttgttataggtctccctccaccagaagcccacctccacgagagctcgggattttatctattctgttcattactctatctccatctccagtcagcaaactttttctgtaaaggacaagataggaaacattttaggctctgcaggccacacatacagtctctgttgcaagtactcacctctgctgcagtggtacaaaagcaaccagagacaatatgcaaatacgtaggtgtggctgtgtatcaataaaaccttatttcaaaaagcaggtgatgcgccgaatttggctggcatagtttgacgactctttttctggaataatgtgtctcaaactcgaatgtgcacacagattaagttgcagcagggcctgagattctgcattcttcatgagctcccagaggatatccaggccaccaatccatggaccaaactgagcaggcagcatctaacacaatgcctggtatgtggtagaagcccaatgtttgttgaataaatacaagataagaggaaaaccactcataatcccactcaacacttttattgctgcattttgaccatggcaccatgcccttgctaaactatctactaatcaggttttatctttactgtttggggtttgttttgagacaggatctcactctgttgcccaggctggagtgtggtagcatgatcacagctcactgcagcctccatctccaggttcaaggaatccttctactgtaacctcccaactagccaagactacaggcatgttccactgcgcccagctaattttttgtttttgtgttttttttggtagagacaagggtctggtaatgttgcccaagcttgtctcgaactcctggcctcaagtgatctttgtgcctcagcctcccaaagtactaggattacaggcatgagccaccatgcctggccctgctgtatcattttctgatggatagaggaaggagagacggatagatacatgacaaggcaagtgtgtcctgagggtttattttatgtcactaagccagggttcaagcaaaggcaaggtttaatcaatattcacctgatacaggttccaaaaactattcctaggacagcatttacagttttacaataaatgtcaaataggaacatgggattcacttagtagaaacctcagtttcatgggaagagcctacttggttaaataaatgatgtcaagaggatcaattcagcttcacttcttattcagaaaaatgaaaatgcaatggcttcctaagttgagcagtaataactgtcttgatcatttattaggaaggtaaaatgtgctgagcagtatgccaaatccttcatacattataattctgataatgacggcaacaaagaccacgaatacaacctcaagcacaaacacagactatctctggcgggatgtccagagaaccaatggcactggggcttaggaagacgaggtggccacctaggtatgagggaagaccttgccctgtacacagcttgtattaatacctttcaaattgtgcaccatgtgaatgcatttccccaaaatcaatttatgaaagaaactagagcagtttgcacttggcactgtgctaagtggtgttttacacacgttctcattgactcctgtaaaaatcctaaaagacaagtaacattctctccaatttgcttcttcggcaaattgaagccccagaaggtcaaattatccttgctcacagtcatgccactagtatggtgagaacaactcaggctggagggcaagggtcaggtaggtcccatgaccatctcaatgtaccaccatttgcactgggagctcatcctcctggaggaggcgggcatcggagggcccaggctcaggccactaggctccccaggttctactctcagatgcttctgggcccagctgccctgggtcaggccactcacaggaggacatgcttgggggtgtcaacagcagcccacagcgaggctgcacctgccccatgagccactgttgttctacctctgcctgggaggggccttcaggctgctgtagccaaacacagggagaggaggctggggcagggtagataccaatggatgacaaaagcctgaacaacctgatgaagaaacaatctcacttgatgcttgaccagcctggatttatttcctgaatgtttgagacagagtcttgctctgtcacccaggctggagtgcagtggtgcaatcttggctcactgcagcctctgcctctcgggtccaagcaattctcctgcctcagcctgctgagtagctgggattacaagcatgcaccaccacatccagctaatttttggggtttttttgtttgcttgttttgagatggagtcttgctcctgttgcccaggctggagtgcaatggcgcaatattggctcactgcaacctccgcctcccgggttcaagcgattctcctgcctcagcctcctgagtagctaggattacaggcatgcaccaccacacccagctaattttgtatttttagtagagatggggtttctccatgttggtcaggctggtctcgaactcctgacctcaggtgatctgcccgcctcagcctcccaaagtgctgggattacaggaatttttgtattttcagtagagccggggtttcatcatgttggccaggccagtcttgaactcccggcctcaagtgatccaccagcctcggcctcccaaagtgctgggatcataggcatgactcaaagtacctggcctgtttcctgaatttttcaaaatgctagagcaacaatgagagcccccaggagcaacctggaaaattatctcaaggtcgttaaagatttccatttcttcaccactaaggaacttattcatgcaaccaaacaccacctgttcctcaaaaacctattgaaatagacaaaaacaaacaaacaaaatgatttccatttcttctttgtggcctaagcagttaagagcgtgggcttttgagctggactacctaggtttagttcgtggttcccccaattcctgtgtaaccttagacaagttgcacagcctctctgtgtctcaagtactgcctagaaatattaggaggattacatccatttatgcatggaatgcacttaaacttactcagtaaatgctgtcacctcccctgcagtcttcaaaataacctgatatagactcaaatatgtgagaacagcaggagctgagttttgtgagctcaagtgtgcaggcgcaggggaaaaaaaagactaaaaagaaatacaccagcaataagagtagttcactccaggtcatgaagagtgctatctagttccttttttttttttttttttttttttttttttttgagacggagtctcgctctgtcacccaggctggagtgcagtggtgcggtctcagctcactgcaagctccacctcccgggttcacaccattatcctgcctcagcctcccgagtagctgggactacatgcgcccgccaccatgcctggctaatttttttgtatttttttagtagagacagggtttcactgtgttagccaggatggtctcactcgatctcttgaccttgtgatctgcccacctcggcctcccaaagtgctgggattacaggcgtgagccaccacgtctggccatttcctgtacttttaaaaaaatgaatacacattaaagagctaaaaataaagtaaaataattgaataaaaatacaggggcacagacacacaaatacatatcggtgtacatacacattgtatatatatgtgtaggtgtgtgtatatatatatatatgaatatatataatttatatgtgtatttgtatgtgtctctgtgtatacatatacacatgcatacgaatgaaatttttcgaacctgtgccagtattcagaataggcccccgctaagctgtggacttgagaaccacaccgtgcaatggaaatggcttggccaaagtgcccaacagaatgcttttacgttcagctctcccacatcccagatgcttggccttgaggaagtcctttgacctcaagagtatcagtttcccaggctgcaggctgggtgtcgttgtcgtggcatcgtttgaggacaagagctgcgcacagaacacataagaaatggtgagagggaacgccctccacaccgtctgcccctaactcacacccatgccagctcagaggtcgcggcatgaaactaaagcctccacatgagaacaaatgctcctttttaaaatcctaacacgatggttcagaggacaaattaataagaaaaacaatgagcatatcttgagctctcatcgcaggcagggccctgttttggcacctcaccaatttaatacccatttaacctttgcaatgaccctgggaggcaggcattcgtctcagcctcctgaagagcaatgcaaccttgaaaaagccactcagcttctccgagcctcagtttcctcagctgtaaatggggttaatggcagcgccactatctctccaagcaggcacacaggaaaagctcggccagggtcagcctgctcatcactggcgatgaggtgctcgttggggaaggtgaggctcaatgcctctgagccttggtttcctcattcacagagcagaggctgcatgcctgcccaagccattgagccattccacatcatgtgcttgtcagatagtaagtgctcagtaaacatgcatgactattgctagagtcggcccatagtcttctaggaggttcagaatgaatgactttgacattcgcaatgtctcccaggatccagaggaaacagagccccgtgagaagccatcacctccccgtgttcctccccacccacccagccccacctccccacatgctccagttcatgactttattgtcaacggagctagtgccttccgaggccgttaggagtctcattcatgggactaaattagaaaatgctcaatgttcaataaagaggtcttggcctccacacccactaaacccacagggtaccagaagggcagcagggccagctggtgacacggacactcctatgaacatcagcctcggcctgcggacgggttgcagcgagatggctcgggggcctgcgaagtggtcccaggtgtggtcatggtcccctcttgtggcatgttgcagctgacaggtgcttagaaacccacctaaagcagatgtctcctttcccatataatcagagaaaatcagcttcacctaaggtccctcagtggcgagggcggaggcaagggcagaacctgaatgcctgaccctaggtccaggactcaggtcacatggccagccaggcactgcgctgagctgccgcagaggaccctttctaaagcctgtcccatctcactctcacatccagccccggctggagcgctccacaggcgtctgggctcagcccatgtgctcattgtaccccatgcctggggcgtgatgctgctgccagcaggtggatgaatgagtgagtgggtgagtgaaagataagaacccagaagttcaaagccaaggccagggcttcattgctgaccagctgcctgactttaggtatgtgagcttcacttccctgtgcctctcacccctcgtcgaacaggaataatagcagccccgactcaccatgtggttgcaaggatgagctaagatcatgtctgtaacaaacagcgtgtaaataaacaactctcagaactctcagagccccctccgtatcatagcctggtctcagacgtggttaattcaaccagaaaaagctggaacaggctcaggaatctaaggctcgtagagctcaaaagtgatctatgtctagatggccttctctctcaacgaaagaacaacagatgaaatgccttctctgtgccaaagatcacactggaacttttgtttagcatcctaactatgctcaacaaacacaaaacaaatagcctgacagacgtaagtctacatcactttatcattgaagaaactactgcccagtgagtctcccagagtcccaaagctaccaaaccctagagctgcctcacttcgaaccacccgcttcgtctacttccaagaggcagcatgggccagtggtcaacaacatgggctgtggctgcagacgtcctatgccccaatcaagcagcatcgcgcgctggctgggggtgacccctggcaagctgcttacccgaactgtgtcccagtttccttgcctgtaaaatgagcatagtaatcctaccacctacactctatggcatcgctgcaaagactaactaggtcactctaaagaaagcacatggtgaagtgtagctccagccattatgccaccctgcccagcacacacgagggccccaacatttatttgtgacacaaataaagtttcttctatattgttcctcttggttgccagaaatactgcaagtttcagacttaatctcccttttggcaacagctatttctccaagattctggaagccttctgttttctgcctatgtctggggacaacactttactgaggctcattcctgacaatctcccttctactgtgggctgaaagcacccctcagtgaacctccgtgtcttcagttagaagatgagttagcaggcgggccggtctcaccacgccacctctctgcctgcgccagccccgaccctggcgcaccctccccctctctccacctctcacctcggaggccagggtgcaggtctcaatcgtttcacaagtccatcctcgaccactgcgggcatccctcagccggggacacgtgcggcggggcagagagcagtgccacaactggcccacgggtgtacctggtttggactgtagtctttttcaaattttaatgaaatcaccagtctcatcaaaagactggtatagacaaggaggaggtggtgaggatggctcctcaaaagtcggcctcagaacccccacatcacacaccccgctctgctactccccaccccatccccgcctccatcttgaagtgaaaaggctacatcaagtcacctctaaaagatgctttccctctaaaaatagcaggagtctcggcagggatgaacagggtccctagagactctggcctttcccaaggctacagccccagacagacagatgccacccctcttgcagccagtctcaaaaaaatccagttagcctgactttcaaaacatgctctgactctaaccccttctcctgctcccccatgcccccaccctggtccagccaccatcccctctggcctgggcctctgcagcagcttctccctgtccacaccccagcagagggatcctgctgacacctacgtcaagccaggccctcccagctcccgcctcgctcagagtccaagtcctctaactaaacatgtgcgaggcccacgatccgcccccctatccttccccttcccctgcccttcccacacaggcctcctctctgttcaagatgtcacccaactcagccctgctctctcctcagcctggagaggtccctgcagcttccacgtgggcacctccttctttgcccaaatgtggctttcccagggagatccatcaaaccactcccaattctccttggcctgatagttttccccataggacttatcacctcccaacatactatttcattttcctatttaacatactatttaaaattttcctatttataagctatattgctatctccccctagccagcacatcagctccacagggccagggatttttgcctgtggttcactgccatattcccagtgccaagcacacagtaggtgcttggtaagtatttttaataaatgagcaaatgaaccccagtgatctcagaacattctcctcctccaattttttggaagcctgagtgacccggccaccacctctttcccttcccctccccaggaggtccaatggaaccttctgtagatgccaacacagcagccctgatcaagacaaattagcatcagcaagaactacttcctgtctcacgtccccaaacacaaaattttattagacaaatagaagctaacacacccagccaactgctaaaggagcactgcttactgtcacgagtgcagctttcacctggaaaggaaaaaatcccatctggcttgcttcttcccttccttagatatcatttcaagtaagttgcagttagcataaaagctgaaatccaacagaatgagcatccacgtcccataatccattttatgaggttttgaaagactggagactttaccagctcctccagcccaggaggcagtagcctggacaggtgggcctcaggccctcactcacctccctgcaaagctcattactgttaccgggaatgaaatggccatcgggtttccgcatctgcaaggaattcctcgtaacagagctacccatgttttttccacatgtctgaacatctgcttgaaagaaccaagaggactctttggaggtgagtgcgacgcttccacgttctcatattttgatcactccctaaaaggatggcgttctgattattctttccattaaacatgcatcccagagagttgtaagaataacattttttgaaagccccagcacaaggatggataaggaatataccaaagtatcccctccagggaatttctgtgcagaatatggttaaagggtttggaagccgccaggaaaggattaaatgacaatggcgttatacaggccactctcaactgggatattattagacctcataagctgaagaactatggaaacacttaaagcccaaccttgcaaaaccgctctgaatggatgttttgtccaccggaggaccactgcatcctgtcctgaaacagggcgaggaatgatggcagggctccaccaaaagcgtgtggctcttttgagatgaatcaagtggttccccttttcatctgatacctgcagaccaaagtcaggcttgtgcattaagattcattggttcctctgaaagaaccctagacttgttctacttcaataagatttagaacttttttatttatttgtttgtttttttagagacatggtctcactctgtcacccaggctggagtgcagtggcacgatcacagcggactgccgccctgaactcctgagctcaagcaatcctcttgcctcagcctcccaagtagctgggattacaggtgtgagccaccacactcacctgagatttagggttttataagagaaactacctcgatccggctgttaacagggttcgttctgtaactagacaattcttagaaatcatataaatataacctctctcttatctcccttcctatttgataaaccttgaagtagcaccattcttatttattccagatgatgtgaactgaagcatatttgccatgagccaaattcaacccaaagtttgatttatggccaaaactgaaaaatcagaaatttcacataaaaattccaactcctagctcttgggaaagaagaaaaaacaaaacctataaaacctggcaacattccacccacattcccacatgtcacagcctatagggactgaacagcaactgcctcctgaggcaagactcacatgccgctctgccctactccccaccaccccctgttgctccctgacatttggtcagttcagtcatttcctttcattgcctggccctcctgggcttgtctgtttgtgatcttgtttatacagtctcttctttgcttcttccttagtccactgcttctagagagaggcgcattgttactgagggtgtggacagtcagtccttgcaagtgggtgcttgctggggcctctggtgatgcagcgtgtggccccgaggcatcccacaggcctgagagcaagttgaggactttgcttctgagctccaagctcatatatccaactgtttacttgacatctttgctcgtgtgccttggaagccctttgtaccttctatgccccaaagagaacttgcaatcttcccccaagaaaacactttctttcccaagtccttctccgccatccatccaaccgaaccatccactcagttgctcctttacctcccatacctaagtcctgaagatcacattatagagtccatagcttccgctcccactgccaccttctagtccttaccaccttgatctttcccctggtactgccacaggctaacaatctcatctccctgcttcttccgtaacttcttctaatctagtccccagggagaaacctgagtgatctataaaatgttaaatcagaatcaagttcctcctctactcaaaacgtatcatgtcttccccttgccctggaataagcaaaatttcatctcctcaccttggcttttaagccctgcacagtttgggcctgccaaccatcaccctgcaagctaaacttgaatgacactggccctccttcagctcttcagccacacacagtccttccctgcctcagggcctttgcatgtgctgtgctctgtgtgtagaacactctcccccgactaagagagacagagagcacggaggaggaggaggacatcatttgtctctttgctggttctatgacctgttccaggtcccagctgacaagtcacctcctcaacgagacactctttctaaagtaggtcttccaagtaccatctcttgtcatggtttgttctgtagaagcagttcctcccaagcggtgaatccaatggacaagcttctaatcagccatcacgtcccaccgtgagtccaggcatcagcccacagatcccctccaagtggccgccatctggcctctcaggcctccctgaccaactcaaaccatcctagtccactttcccgcagcccctgagctccctcagggcatgagctgtgctgatctcaccaacgttgtatcacctgcaaccagcacagtgcctggcacatggcaggtccccagtgagacattccccatacaaatgagtcatgagatctgacaagcacttaaggtttgggaacaaactttctcccaagaccaagtaccattcaaaaaaagcaatgaagagaacagctgagcatggcatatgtttaagatttttaattgtacacttaaggataaaaaatgaaatggtcttatattcattttctttttatataaagaggagcttaaaaccactaggcatgaaaaaagaatgaagttctatagtgaggcaaataaaagagagaagggtggagactgagtaactgagaggggagaagaggctgtggttcagaaatagaaacagatacagagataaagagtgagacagaaatcaacagagaagccggcggaagcattcaggcaaggtacaaagcaggctacactgctcttctggatatgaaaggggcagtgctgcagattccagaaggagttttcacactcccttgaagggtaagagcagcaatcctcttaaagtccactcttttctcaatttttccaagaagtttttttttttaaactgacttcccatgctaaaaatcagtaattagcatgacttattttgaaaaaacataatctattcaaatgactttttaaaaagactccactttttgtcttttaaagagacttgtctgcaagtttttaaatcatatattggatcttcaaagttacaggcacttgggccacttgtggtggctcacactgtaatcctaacactttgggaggatgaggtggtaggatcacttgagcccaggagttcaagaccagcctaagcaacgcagggagaccatgtctctacaaaaaaggaaaaaattagctgggcatggtggtaacacgcctatagtcccaactactcaggaggctgaggtgggaggatcacttgagctcagaaattcaaggcagcagtgagcagtgatcatgccactgcactccagcctgggtgacaaagcaagatcctatctctaaaataagcaaacaaataaacaaacaaacaaagtcacatgcatgaagaggcaagagtccttgggagctatcagagggagaagcacaaacttcagggacagcctagcaggtgtctcctggactgtacactcagcccattcccttctctggaaatttccagggccccagcccctgatgaatgggtgagctgagcctcactcctcatgcagcccaacctccaggccacagcctactggaccaatgggcggcaccctcccaagacagggccaatcagcatctccctgagaatcaggatttagctcccatgaggtgatgacaaggctcatactggaacagcatgcaaaactagggggaatggagtggcccgcaggaggcgtgggcatttccccttcaggctttttctgcacaagtgagaaggcaggaagagctggtctgcaaagagacgtggatgatcagatctactgtgctgcaaatagagcttgcggtatccaaatcccagctccaccatttaatagccataaccttgaacaagtccttgacagctacttgacctgttacctgcatcataaggctcttttgaggattaaataagttaacacatatgcagcacttggaacaggatctcacaggcagcaaatgttttctaaatgtttattattactatcatcttgccaaaatgtaagctcatgatggtgagaatttccagctgttttgttcatatcataacccagaatcaagcaccatgcctggtacatagtaggtgctcaataaacatcttttgaataatcagtgaatgaagatgccacaaagccagaaatggatacagattctctctccttaagacttaaaattgtttggccaatgcatttaatgagcagattcattctccaagtatttgttgagtgcctgctatgtttgtggcagcaaactgtgcttgatggtgatatacaatgaagaataagaaggaagttgtggtctcttttaaacaaagctcatggtctaagagagagagacattgacaaaataattatgcaaatgttagaattacaagtagtggcaggtagcatgaaggaaaggtgcatggagctgtggacacataaaacagagcacttggccaggcacggtggctcacgcctataatcccagcactttgggaggccgaggtgggtggatcacttgaaatcaagagttcaagaccagccagaccaatatagtgaaaccctgtctctactaaaaatacaaaaattaaccaggcatggtggcgcacacctgtaatcccagctactcaggaggctgaggcagaggaatcacctgaacccaggaggcagaggttgcagtgagccaagattacaccactgcactccagcctgtgtgacagagtgatagactctgtcaaaaaatacatatatatattacataaggcaattgctctcaggattggacggcaggaatcagaagactgcggtccccaagggagaggaagtgcacaggtgagcccaccttcatttcagctctctgcctggggacagctcccctgccacgtgcaggaagtagcatctgagcagagcacagtggtcccgctgtgctgaggattcctgaaataatcctggattcctggcaccgctcagagtgccaggctgtggaaactgctggaatcggtggcatcagagaggaggaagctgctgggggaaaccctcaactctttggccaagggctgggctgtgtaagcacagggagagatggtgcgaggtttaccagagaggggctgctatggggtggagagaacagagagactaagagtgcagcggagctggcatatgggaattccagcccaccagattaaagagacctccccaccaagcatccaaaatggccatgccttcagaacaggcacatgcctcagaggaagggctactccaggcctgccctaatggggcctaaaaccaatcctcaaataaaatacagagaagacagtttaaaatctaagccccatcaagttagatacaccttgtgctttccacagatccacctgatgaagcacgaaagaaagttcagaatgtctaccacatccagtatatatcatcacgatgtcagaatgcagtcgacaactactagacaggcaacacaacaggaaaatgggactcatggtcaagaaccaaaactcaatgaatagaaacagattccaagatggctatggtgtctgatttaaaaaaaaaaaaaagcaattgtcaggacttacaagttcttaatattatcatagatgtccttaatcagaggtacacacccaaagcacctgtggagatttggggagtttgctgtttttcatttgtttgtttgtttacctgggctttactcatgttatatagtttctaatttagtttcagaatgcccaacaatctgaatttttaagaaccaccctagaggttctgatgcacactatagattaagaaccaagttttatcatattaataggatacttctactttaaggcaaataccaaaaaaagttatattaatttaaatgtattaaaggttctagttaattgacttgttagtgggcaccagtcagttgttcctggttaaccagattatacaattaagaatatttcaactccaattattttggggaaaaataggcacacttctctacttattttgaaaaaaaaatctgaggttaaatcaaaagccacagacacacaaaaaagctactgattaagaaaaaaacaaaaggaaatgctcatggcaaaatgtaaacttaaaaaatcagagtacaatctacatgttcactatagaattaagaatagaaatatatggtaacagaggctggcgtgtttgtgaatagaaaaaagaaaggcaatatataaaaatactaatatagctattttaggtagtttgataatgtatagttttaatttttcttacttttctatattttacaaaaattaccattttttcttaatgaactcttcatctgaaacttaaggtgatggtttcagaaaccttctgtcaacacacaaacctctgcaaaactctagcagtttctccatcagaaagagaagggaagaagcatccgggcacatgaatatcatttctatccttatcctgctgaagaagactttctcttctggcttatgagtagctggattagcttctaatgctaatttaatctcatatttctcattcctcaaaggagtaagaggctgagacacatacctcaccttaacaagcaacaaacagtgggtcagcagaagtgaatctcttagtgacaaacaccacacacaaaaggaagagcattcaagtccatacctgaaccacagggtggcctccagttggagctttgacagcccctcggctgccttctgtctcatagtgggcccggtgatgtggcttgggctgcacctcgatccgcagctcgtaagagcctgactgactggacagcggccactcaagtggagggagggatgcagtcactgggatgctaaaggagaaaataaaatcagccatgtgtgcaataaaccaaaattagtcaacttgtacaataattgtaaacggccctttctgaaaatcatggatacagtcatgtattgctcaacaatgaggatacgttccgggaaatgcaccattatgtgaacatcagagtgcacttacacaaaccaagatggcacagcctactacatacctacactatatggtatagtggctcctaggctacaaacctgtacagcatgtgactgtactgaatactgtaggcaatggtaacacaatgggaattatttgagtatctaaacttatctaaacacagaaaaggtacactaaaaatacagtattatggctgggtgtggtggctcatgacttaatctcagcactttgggaagacaacatgggtggatcacttaagcccaagaatttgaggacagcctgggcaacacggagagaccctgtctctactaaaaatacaaaaaaaatcagccaagcaatgtggtgcatgcctatagtcccagctacctgggacgctgaggtgggaagatcatctgagcccaggaggtcaaggttgcaatgagctgtgattgcaccactgcactccagactgagggaccagagtgagaccctgtctcaaaaaaaaaaaagaaacaaaacaaaaccaaaaaacaacacaaggctgggtgcagtggctcatgcctgtaatcccaacactatgggaggctgaggtgggcagatcactggaggccaggagttcgagaccagcctggccaacatggcgaaaccctgtctctactaaaaatacaaaaattagctgggcttggtggtgcatgcctgtaattctagctactcaggaggctgaggcatgagaatcacttgaacttgggaggtggaggttgcagtcagctgaaattgcgccactgcactttagcctgggtaacagagagactgtctcaaaaaaaaaaaaaaacataaacaaaacagtattataatcttacgggaccacccccacatatggggtccatcactaaccaaaatgtgatcatggggggcatgattgtatgtgaacaaaatgctgaggcagcacatatttcttacacatgacaggtagaactgttcacagggtagagatcttcctctttgctttctcttccaccttgataaagacagtgtgagcaacttctcaattaatgaagcttatgttagttctagcatatttctaactgctgtcccttcttttcccctgggaattttgaaaagcatcactatggatttatgtcaccatgtcctgagttttcacatatggcagaaatcattcatcagagtattttttcccagttagctcagggctgctaggagctgacactatcagctgggcttggttaagcacttgcaataaagccaattctatgtcttctctatcacagcagtaccaaggggagcccagggggtagcacctccataaacttcatctgtgccagagtccaacttaaacatttcatccaacttataatcatatcctccctgtgcaagcaaatctcctccccttctttccaaccacattgcctcctgaaatccctcttaccctgcagtccttttttttgaagtttcatattctttaattttgaaatatcgaaaatggattcaaatggactaacattatcaaataatcactcacatctaaccatatgatttccatatagtttgatacaatgataaaaagaaaacaaaaattacaatgaaatagagttgactttaaagaatatttaactactcattcatttattgactactgcaaatttttcactctctagggctatgacatgaaccatgaagtatatttttaattttttctttttttaaaatatgggctcttgctgttatccagtctggagtacagtggtgcaatcatagctcactgtagcctcaaactcctgggctcaaactatcctcctgcttcagcctcctgagtagctgggaacacaggtgtatgcaaccaggcctagctaagtttaaacattttgtggcggggccagctgggattacaggtgtgagccactgcgcctggccactctgcagtcttagggtatccaaagtgcctttattttaccttagttacagtgccaacatgctttcaagcttctgcctgcaaccaacgagccacacgtgtcaaacacttttacccatatcatatacacaagtgaaaagtttttaaaggtttacaaactatgactccttaaaaaaccactttagccctgtattaatatgctttaaagcaccaaaaattttgtgagaagaaaattcagcggcatatccccaggtatcaatttatacttttgtttggttccgaagtaggtatttgatgctgaaatacaatctgaagaagtagagcatgcctgtaatcccagcacttatgggaggctgaagcgggtggatcatgaagtcaggagatcaagaccagtctggccaacatggtgaaaccctgcctctactaaaaatacaaaaaaaaaaaaaaaattagccaggcatagtggtgtgtgcctgtagtcccagctactcgggaggctgaggcaggagaatcacttgaacccaggaggcggaggttgcagtgagccgagatcagctactgtactccagcctcggcgacagagcaagactccatctcaacacaaaaaagaccgggtgcggtggctcacacctgtaatcctagcactttgggaggccaatgcaggcagatgacgaggtcaggagtttgagaccagcctgaccaacatggtgaaaccccatctctactaaaaaaaaaaaaaaaaaagccaggtgtggtggcaggtgcctgtaatcccagctactcaggaggctgaagcaggagaatcacttgaacccaggaggcagaggttgcagtgagctgagatcgcaccactgtattctagcctgggtgacagagcgagactccatctaaaaaaaaaaaaaaaagaacaaaaaagaagtagagcatcagagccagcatgaaattctgatttgaattccagccctctgctgagttgcctgtataagctgagatcaatgttatcaagagacttccctgatgccccatcctctcaactttatagaagattcttgcaaagaccacatcggctggcacaggttggtacttgtgaggaactaaaggactctgacactcaaaacctctctgatcaacctgcctaatggagaggaaaggattttgtaaacaaagtgtccgataaatgtatcataatcatattttatagcagtgtccctccctattctcaaccactaaataaaatcatggtttggagactgacctgtctacgtagcacaaagaacaaggagttaagaatcccagattctaattttcaatgtagtcattaactagctggtgatcatggggcttgtcacttcacctctctgagcccaaatttctcaatctgtaccaggagttagtcttgatcaggattttcttttttttttttttacagtccatttccgtgtggtacgggggtgtgtgtctagtttgcacctgtctccccagtgactagcacagtgcctggctgcatttcatgaaagaatgaaggaaaagtgaacgaagggtaaaaagagaaggaaagcaggaaggaaagaaaaagggaaaaagaagaaaaggatgtttcctttttatttatttatttttatttattattattattatttatttttatttttttgagacaattttactcttgctgcccagactggagtgcaatggcaccatctcagctcactgcaacctccgcctcctgggttcaagtgattctcctgcctcagcctcccgagtagctgggattacaggcatgcaacatcacacccggctaattttgtatttttagtagagacagggtttctccatgtcggtcaggctggtctcaaactccgacctcaggtgatccgcccgcctctgccttccaaagtgctgggattacaggcatgagccactgtgcctggcagcattttctaagatagccctgtgaaacttcagtcaccaaactcagaactctgtagccaaatggcctttgaaatcaccgcatattctgtccacactgaagtctctgagaaggcctgcacacaggcacctacttaactctcttaaacccagaaactcctttttttaaagatacaacaactgacatactgtagccctggtgttctcagaacctgctgtggaggaaatgccaggctggatgctccctgctgtccattttcatctggtatgggggtgaacaaggcccagcgggcagggcccgaggccaccctcaaccccacaccaatcaaaagagctctacctttatctatttaggtactcaatttttatttttattttttttttgaggtggagtctcactctgtcacgaaggctagagtgcagtggcatgatcttggctcactgcaacctccgcctcccaggttcaagtaattctcctgcctcagcctcccgagtagctgggattacaggcatgcaccaccacacccagctattttttgtatttttaatagagatggggtttcgccatgttggcaaggctggtcttgaatttgctacctcaggtgattcgcccacctcggcctcccaaagtgctgggattacaggcgtgagccaccgcacccggcctatttggggactcaatttaatattggggataaaaggcttccatttgctaaaataaaaaataacctgaaaaccacagggatcgtggtaatagcatgagtcttccaattcctcatgtaggagaacagataggataatctctggccttagccctcatgtacctcctttgtcatttcatcaaaatgaagataaaaaataatacaaaccaagtttctgtgagaatcaaatgaaataacatacatagagagtgcaattcatccactgtatccatgggttctgtgtcctcagattgaaaacattcagaaaaaaaattccataaagttccaaaaagcaaaatttgaattttccatgctgcagtttctactttgagtccatgtggtgtgcaggcattgtattaggtattctaaggtatgatcatctagagatgatgtaatgtatatgggaggatgtgcataggttatatgcaaatactataccattttacataagggacctgagcatcctcagattttggtatcccaggatatcactgcacaggctctatactaagagattcacatatatcatctcatctaatccattttttaaaaaaacacaaggtaggttctattattttctcacagggagtaaaccaagaccacaaaggtgctcagtacaaaagcggggcgggggggtcggggagggggaagctcttgattgattagtgatgtctgcgctaggcacggcttcataaaggtgcccaatgagaaagagggtgctgactgattagcaatgtctttcacaagcacagcagcagaaaggcagcagcagagatgcccgtgttcactcaggtagtgagtggcggaggcaggactcaaagcgagccttaagagactccaaagcctacgtgctattctgctatctacatacatctcctcagcttcccaagactttaagctccttggctcacatatttcttttttttttttttaggtcctccatataactgcggcacacagcagatgctaacaaacatcacttcctcttataatgagatagattttacatattaaggcttgctttgtgcctaccagaatgtcagctccatgaaagcagaaatttttgcctgtttagttcaccactgtctctccattacttatgtaacagaatctgccacctagatgtttgaaaaacactttttgaataaaccaggtgccatatgagcaattacatttatcatgactgcatcctcatagccacctggtgagtcaggtacacgaattatacccattttacagatgagaaaaacctggcccgggaatttaacttccgtctcagggtctcgcaaccagcaaggggccaagccaagatttaaatccatttaaagtcagtcttaaacctgactctgaatcccatgctcataaccagaaaaccatctcttaaaactaaaccacagaatcaatcattttcaaagccctgctcacctgcagatgggaatggcaggcaccagcggcttgggccaagtgggcggaaccagcaggatggattctggagccgagtttctcctctcgccctgctcgcagggccccaggaactccacggccgggtagatgtggcgaggcaggccggccttggatggggcggcagacaccggcgaggggtcagggctggtcttccacatcttgggggggatcccacaaggcgagtccgtggcgaggctgttcagggcatccatgatcacggcagagccagccacaggggggtacccagccggggagccgtggtcctggggtgccacgtgagatgagggctgcggcgaggggctccgggagcgctggggtgaggctccgggcggcagggcaaccaaggcctcggcgcacgaatgcctccgcttggcaccaggcgatgaggagcgggaggccggacggggcacgggcgagtggcggcccaggcagctgtcctcggcgaggctggttcgaggtgacattattggcgaggttctgggggaataatgagcagggatgttttgaaactgcggacacaggtcgtcgggcccgccgttattgggcgagacgcagggcgaggtgtagggggagaaggtgtcagaaatgaagctggcagaggagccgctgctagcggggctcaagcaaagcggctcgcggtagccctcgaagccgggcacgggcagggtgaacctcgggctggcggccaccccggccaggggcggctgctccaccaggaggcccgcgtctctcatgcggaggggccccactgcctggatcagttcgtgggacggagtgatctcgatccgagggctcaggcccgaggcccctgctggcttggccgcgctcagaaacttctgcggccctaccctatccggctctccgaatcggccggggggctcgccagagagactagcaagggggctgtatggcttgaggccatagtccaggacatcatcggggtatgcgggtccggagggtgggctggcgaccttatgtgcattcggctcttctggaaagagaagggggaagggggttctttttaagcctcaaaaacagaactcccggtgcagagcaatcacaggctggatttcgtctcacgtcgtttatttttttcaaattcccaccatgccaaaccccaagctagaagctccgtccctcaccagaagaaaactgaggccactttgtcccaggtccctggagaagacaggtcgaagcagaatgagttctggaagacccctgggctaagggcctcgaaacttggctttaaatgaaacccttcggagaagtgcactttatctcacaaccccattcacgccaccatatacacccacaactgaaacaaaagcctctcgagtcaatacttacccctgctacatgacaccctcagaccctccctcctgcctgagtgattttgcttcaacgctggtcacgacccattagacggatcccctaacccgtctgcgcggtaggtcatgacccctagtttgaaaagcacctatctagggcctatggcagcactctacacacatgacgtggacgcaggacacagagggaggctgcgcagactctgcagcccacagtgccctgggcttcaatcccagatttcacaccaagtacaagaagtggcttcattcagatccagggctcctgactcatgtctcatctgtgtcattttacaaatgaggaaactgaggcccagagcggggaaaaggcccaccgaaagatacggaattagcaggcttaaaaataccacaggcaagccacttgccccccaacaggcagggtcactgctacagaggttacctgacacccaaactattagacccaatggatgcaggccgggcgtggtggctcacacctggaatcccggcacttcgggaggctgaggcgggcagatcacttgcggtcaggagtttgagaccagcccggccaacatggtgaaaccccatctctactaaaaatacaaaaattagccaggcgtggtggcacaggcctgtaatcccagctactcaggaggctgaggcacaagaatcgcttaaaaccaggaggcggaggtttcaatgagccaagactgtgccactgcatgccggcctgggtgatagagtgagactctgtctcaaaaataaaataaaatacactaaaataaagataaaaccaatgactgcaaaatgacctaacttcctcttttagcggctgcctagcccgggctcctgctgccacctcgaaaggccctaccgctgcagaatgctgttcaagtagaatgttctatgtcagccacccaaggacactgccacccatcacctcacactgtcatttaattctcagcctgaccctcttctagcagacaccctgcctcactgcatcctgtacaggtccaggcacgtggggctgcttgggaaattcccacggagttagtgccacccacccacccctcacagcaactccacctccaaggccccccacctcatcagaggctcctccaacctccccgccagctcatggggcggcctggactccttactctgatgcctcacatctgatccatcatcagccctgactgctccactgtcagaacagaaactagattcccaggtctccccattccatcgcatccaccctggtccaagccgccgtcctctcccatggggactactgcagtcatctcctccctggcctccccacttcctctgtggctctgtcagtctgtttgtcacgcagcagcctttaaaatgtccattctcaaaacctactataaaggcttctggacactttagatggaacctaaagtcactaacgcagcatgtgccccggcctgccacccacccccaccactccccacttctccccaagctgagtcagcaacaacccctccaacctcttcgccgtacttaagcagctcctgcctcagacgccttgggttccctctgcctggaaaccctccccgcgagatcctcccacttcccctggttccttcctgcatctgctcagcccgcacctcctgagatcgacccatcaaaaagatcccctccttcccttttccctgccatcttttctccactgacgcctgctaacagctcccgtcgcaccaggtatctgtttagggaatctcattctgccaaaccaggtgcaggcaaaccacagcccatgggccaaatgcggcccatgggttgtgtttgtaaatagttttatgacaacacagccagcctatttattgacacagggtgaacaaagcaagctacagcttgctcctatactacaacagcagagttggtagtctgggaaccgaatggcccccaaagcctgaaatatttactccttggccctttagagaattttacaaccccacactcgacccagagctccgtcagtgttgggcccgtgtcactgtggcccagcattgtctgccaagcacctaccacagggcctggcacttgcaagcccccataaacatttgccgagtggctgagagaataagtaaatataagaaccatgtccggggcctgccagccagaaacaagccctcttcctgctttgggggaccccaggtggccaccccagtgagcctcagcctccttgttccctttctgggctatcctagaggaaatactgtccagtttagccaagctgatctcttagggtccatatggtacccctacttccaaaatggctccccacagctcttaggtaaaaataaatgacccccgccaggcagcctggctgggccctgcctgtgcatctaccctcgcctgcattcactctctcccctccctctctctgaactccagccaaaggggagtgtggtgatttttgttttgtttttgaggtcttactcagctgcccaggttgaagtgctgtggcgcaataatagctcactgcagcctccacctcccaggctcaagcaatcctcccacctcagcctcccaagtagctgggactaccagtgcacaccaccgggctcagctaatttttttttatttttagtagacaggaggtctcactatgttgcccaggctagtctccaactcctgagctcaagtgatcctcccacctcagcctcccaaagtgttgtgattacagacgagaacaaccgtgtctggcaaaggggagtttttaaaagcatcaagctccttcctgccccgggaccttggtacttgctgctccccctgcctcaacagctcctcccctacccactgccaggcccccttctccacaggactaaagcccattcatgcccatgagctgggcttaagtactgcatgcttctagaaggacccctgaccacttgactagctcaggccccactcacaggcccctgctgtgttctgtgcacatctcaccataacgactgaggaactgtggagtgctccgtttccctcgacctccagtctgcccttccctcgacctcgagatccacccccaccaatcagcaaatgccatgaggactcttgctccgccatgcccctaagcacttggaatggtcctgccactaaacaggccctcagaaaggatgtgttggctgaatgaatgaggcaagttcagaaaagtctacctggaataaactattactcaaagatgctaatatccaaaccaaaagatagaaggctataactctagagagggtcattttgtaatatccatgaaaattccaaacacacgtgcccccggaaccacatgtgccctcggaaccaagcaatgctacttttagaaattcatcctgggccagtcatggtggctcacacctggaatcccaaccgtttgggagacagaggtaggaagattgcttgaggtcaggagtttaagaccagcctgggcaacgtagagaccccatctctaaaacaaaaatttttttttcattagctgggcatggtggcacctacctgtagtcccagccactggagaagctgaggtgggaggatcaaggctgtagtgagccatgatcgtaccaccacctcccagcttgggtgacaggatgagaacctgtcccaaaaaaaaaaaaaaaaaaaaattcttcctgcagatatactctcacctgtgcaaaatgacctgtgtatgcttaagattcattactacaaccctgactgtaatcccaaaagactggaagcaacccaaagcccatctattggggatgaattaattctggctcattcatatgatgggatacagtatagctacaaaaaggcctgaagaagttctttatgcattgacatggaatgaccactgagatttagtattagagaaaagcaagctgtatagtgtgcacagcataaaaagtgagaggatgtacacaaacacagagagatgtacacacaatgtacacagacagatgtacacacagatgtatacagattacacctgcacatatatacacagatgtacagatgtacacgcacagacagatgtacacacacatatgtacacacacagacagatgtacacgcacagctgaaggatgcacaggctttctctggaagtcacaagtaatagtgacatcctccagggaggggaactaaggaatgggaggacagtggcatggcagaaaggagacttcctttgatttgtgtaattgtgtaagaaaataaatgtaactcccaaaagaaacatttttaattttatttcataggtggtaggtgacatagcatgatatacagtaatgaaaccctgttttacgaagcaggaaatgaagagtgcagtcctgctccgccactaagtagcagcgtgactttggaaaagtcccccacccactggaggcctcaacaccttctcatttataactgaacagcattaaactgaatcagtttccttggtggcttctggctctgaaatcctttgatttttctagctagcatctgtaaggcctggagttcttgtgaggctgtagtttaatgtaaatgtgtatttgaattcgcacatacacacacacacgccttcctagaaggtaacagagcacagagttttaatctaggaaaagaggaatgtcaaacccatggccgacaacattctgagaattcactgcccttcgaaccagaaaaacaaaacacaaaaagtttcttagcaaaaattccggccgtatcagaagaactgcactgtatcttatcagaaacacacccttggggctgatgtgcacagtccacagaaacgcagtcctgaaaacacacatcactcacactccctaggagctctgaaaaacagaaagctccagtgtgctgagcaaaagtatttaaagcatttacattggttttcattaatccaagcggcagttttttttttttcctcttgacaagactttaaatgtttaccagcaagcagggaatatgaagataattaataatcatttaattctcagtcccctgggtatttgacagtaaatttcacaaatagcacatcattaaaatatttctctaagtcagtggctgagattcgtcactatttctccttaaacaactgccacgctcacaggcggctttcttacagtcatcacgatgcccgcacggcactgggtgaagttagtttcatctcagaaccaccaaatgttctcaggaggatttccaaaaagcttgctttttttttaaccacttgcacgatctttgctctatccatgtgccaccaaaaagtatttacttaatacttctagtatttaaattcactcacttattttttttttattttaaaaggaaactttacaccactactgcagatggaaaatcaatgtcacctccataaatagaaggtagggtaaaaatacaataaaaataaaacttactaaattcaagcaagacacagtggctgggcaaaggctctgagtctgaggctttatacagccccgcccccgccaatgcttctgcggtataactcatatacacagatgtcagtgttttgagtatagagtttgacgagttttgccaaatgtcatacattcttgctaccaccaacataatcaaaatatggaacatttccaagaccccagaaagtcaagacctaggaacagggaaagggaggagccagtgttagaaagaaaggtgtcaatggtacagcagtacctcactgaagcgctactccttttttgtttgtttgttttttgttttttgagacagagtcttgctctgttgccaggctggagtacagtggtgcgatctcgactcactgcaacctccgcctcccgggttcaagcgattctcctgcctcagcctcctgagtagctgggattacaggtgaccactaccatgcccggctaatttttttgtgttttcagtagagacagggtttcaccatgttggtcaggctagtctcgaactcctgacctcaagtgatctgcccacctcggcctgccaaagtgctgggattacaggcattagccaccatgcctggcctgaaactccactccttctgactagttcaaagagaaaatagcgctgaaaaatagttcttagcacatacaacgtcctcactggtggaccacctaaaatccatttcacctaccatgggaggtacctggcctgcatacgaagcatcagtaccaaagggaggaagaagatagaagcagggatgggggattcagaggttgctgctcaagggcctctgtacctccatgtcacgcacatgctgttccccttacccagaactcccttccatacctcccgaccttacatctcctaacaagccactatttatccatcatgacttgacctgagccaccccctcctggaggccctccctgtttccccaggctggatcaggcagctcttctacactcccaggtcccacagagtcccacattgaagtctatctatggattcactcgtctgtctaccctctagactctgaggttcttagaggcagataggagtcttacatcaataattattatgaagatgattataatgcagaaaaagcagctaaaatatattgagaacttacatgctaggcattgttataagcacattacatgtagtaaattacttgatcctcacagccacctacccactggatgccaatagcagctgccctgtccctctccccgttgtggcaaccaaaaatgtctccaggcatcgccaaacatctcctgccaggcaggctcgcccccagctgagaaccacggctcctggctttagagccccagcatggcacaggaggcctgcgcacagcagaggcccaaagactgctggaagcatcaactcatgactcacgccctcaacctgaactgattcagaaatgagacatcttctcactctcagccctggcaggtgacgctcatctctgtggcagacacctgaaagttctcattcttatcacccctcctttcatcaagttcctgggtgcttacccaataggtaggccctgtgaatatgtggagaaatctctggccactcccaaaaactacaggacaagattgctggggaggccagttcagccctcctctttgccccaccaagcaagagctctacgctgagatccaggtctcagtcaacagagggtagcacggggttaggggactccagatccactcccacccccggctgtgagacttggggaaactccatgtcctcatgtgtgacacggggtgatgacactggtgatgatacaagcctgtcggtttccctaacctatgcaaagcccaagacacacagaatcaatacccagtaaatggggcctactggattattattgaaagaacaatcttttcggtgacaattctgccctttccctgctatagttagtctattttacaacaacttgaacgcactagtccccaaccccttcgaaagcattacgaaaaaaaggaagacatttttataaaaataaaatgggttggtcagcactttaggaattctctttttacctcagatcctgctgaccttcagaaaatgtgtggaggaggtaaaacgtgcttccaacaccctctccattccacactttgtacttttcctcccaggctacctggcagtggatcgactaaatcttactaaagtgttagtgggtcagtgagccgcttgtcataatcaaaatactagcacatctataccacttactttatatcgagaactgtacgcatctagtgtatgttcatatttgtctcacaagaaccctatgaagcagctgatatcgtttccccattttatatagggggaaaatgaggctcagagagggtgagtaatttgcccaaggtcacacagcttctaagtagcagagccaagattcattctcaggcaacctggctcctccacccccctaaccactactttatcctgcatctcaggaaagaggtgatttcctggatggcgacaccctgaccctgacacagggaagcaaggatcccccccggaaaagaaatcactctgggggcctcatcatttcactcgggaggtgggctgcccctgacaactgaagacacagattcctttcttcgggaatgttcacagtctctccttttgccccaggattgagtcaaagattattttaaaaatccactcaggccacacagtggtccccgccagcgcctctccccctggaagctctgtgagcctgttgctcaccctcgcagacggacacacagccaagtctgaggtggccgctcgctcagcgccaacccgccagccaacagatcacttttgaaaaaaggaacagcaagagaacatcttctctgcctagaactgcaggcgggtggaattttcgggaagcagaatcgtatgaccaaaatagaaacccagctagggaacctctgagaggcagccgtccttggggggcacagggaggggcagaggcaaatggagctttcaggcttgagtggctgggaagagagaagcagggcctggcctgggggctggatgcccctccgatgggcagcagggccacagggctccactgatccctggccaagctgatccgacccacggcttgatgagctcaccccgatgccgaggtggcgtgagtcccagggcctgggtttgggacatgacagtctgtcgccaaggcagcacttaggatgccacagctggcaccgcagatctgtagccggaggaaaggggagcagacagagaggcaaacctcgcctcctgccactcgccccgacaactctcataacttcctgcccatcaggggccacaaagaatcccaaaacagagcaggaaggtggacagattcttcatccggcaggtgtgcacaacctagagaaagaacccctttgaaaagcaatgggttgcctccaaataacaaatctgacactcagcaaactttctgacaagcccccagaccactgctgcccacgccccacccagtcacacacatacaccacctaacagtaagtagattctcaatcaatgaatcatgtgtattaatgaccagagtcaggttgtcacacccttcgttcggaggtgacacatacagacacaggcctgaaagtcgagaaattccatctggataaatcaggtccagaaatgccaaaaaggaaagggaggacatttgccatcctgtctcgtccatggaaccactggaaaaagtcatcctgaaggcgatgtctttgctgaccttgccccagctaagacagctgtctgccttccccagacggggctgaaagaaggactcagtggtgccttccaggcaggctgccgcaaggccaggcgcccaggacacaggactgaggtgatccacaagcaatgaggcttgcagactggctctggcatgaccgcttgcaaaaacacacgaacccacgcgctgacacgtattgcttttggataggggtggagaaatgtatggaatctgcaacccgcaggcctcaaggtcaccttttagatgggggcagcagggcccaggcatgtggcacacataaggactcatctccatcttcaaatctggatgggaagaactgtctcttgctggtttcaagccatttcctggggccctcctgccttggagaattccagagatattcctatttttagtcattctaatagcttatgtccactgtgccgcaagctttcacgtgtacgctcccctgttctctctgcagtttacataaacccctggagatagctactccgaacacctctgtgttagagatggggaaattgaggcttggggtgcagggaaattcccaagaccacaaaaagtcagggcaaagcttgcattcaatttcagggtgggggctgcagcgggggccagggggaggggcagtgcacagggggaagggctgtacatgtgtagcatgcacgtgtgtctatacaagatctgcagattccatcagttttgtttgtttttgagacagagtctcactcttgtagcacaggctacagtgcagtggcgcaatctcagctcactgcaacctctgcctccagggttcaagcaattctcctgcctcagcctccctagtagctggaattacaggtgcctgccaccatgcccagctaatttttgtatttttagtagagacaggatttcaccatgttgcccaggctggtctcgaactcctgaccttaggtgatccacccacctcggcctcccagtgctgggattagaggcctgagccactgagcccggccttcattaatttttaaaatatgcatcacttacatgaagtaaaatgcacaaatatttcacatacatcttgtgcctttgcatatatatacacacactcgaacatttcaagtcccccagagggttctctgtggcccccctgaagccagacaccctcgcccaggaagaaccactccctgacttttctcaccatatgctgggtttgactgttctcgaatgtcccataaataaaatcatacaggatgtatatgtctcacttatttggctcagcagaatgtctgagcttcacccacattgtgtgcagtagtcctttcttttttattgctgtgtactatttcactgtcaaatccaccacaatttatccaatcaccttgctgaactccctccgtttttaaagcatttgagattaaactcgtgatttagcaaggtctgcgtctaacagaagagagttcaatgcatgacagagaacagacctcagagtggcttcctcaccaaaaggagaaggaaagatttggtcagaagagttccccagaaatagacttcagataatcctcctgcaacaggactcgccagggctaaacccacccactctgtcaaaggcctgcagaagatgacatgagcaggggaacatcccttctttccatcctctgcccaacttagcaaacagtccctctctccgaccagccacctctgcgagtttggtctcttactgatccccacatcccctcgcacagcctgaaaggctgatttccatttttctttcagccaacctaaaatccaagtggaaacttcccccttgaagacagtggggcctgtgtaacccttggccggggtcagagatttaaaattaatgccttcttgactgacagcttctttatttatacttttccccaggagctttcatttcagtgccatgttcctgggggtgggcacacttcatcagtggcccctgccaaccccctggttattaagacattcctccctactccatggcaacagaggtgatgtcacccattgtggattttagacctgcagcgcaccttcttaggattatacaggtaaacagcccctttccataacctttaaaataactttagcaggcatttcagacttggggttttttttccccctcatttaacattctcacttttgcaggcatgcccaagcaggtctgttttgataaggaccttcataaatcctgagctttgctggccactttcttcccttcagacccagctgaagaaatgctctttttccaaaacctcagattacaaggtcgggagggtcccaaataccaacccaggaaaagcaatctccccactctgcatgtggcttacagtctgcctttggtatatttcttccacagagggaaaaagcattaaagattcaagtgcagggctttagatccaaatgcccaggaggcaggcaggaccatccaccgggatggagaaagaaacagaaaaatagcagagctccctgtcatttctcatttctaccttagccaggagttttccaatgagtataatcccattaggacagtagcaagatacaatttctaattatataaatatcaactataagaggtgaacgtgcacacatcccaccgtacatgagacacatcagacaaagctagagacagcagctccatacggtgtcctgctgccctccagggccacatcctggctgtgagatatagtgctgatggcagggacctagaatgctcagtgcccaagttcaaggcctgccctgccacttaccaatgcaaactctcagcaaagttaccttacccccaagaacctgatctcactggtccaggatgcagcctgagaacttctaatgcagccaggactgagagccccttgccacccattctacatttttcaaatgtatttaacctgccacctgatatggctggagagccttgagaaccaacctgaataacactgctttaaagttttaggagcctctactcctgatcaaaatctatgccaccaaaagaacacaggggcttgaatttagaagccaagatgccacgtgtttcacagggaagagtgagtgaggcaacttcatttcctctgcctccctgcaaggccgatgctcagttctagccctcatttcacctttccagctgcacctggagacgttatttgtccaaagcaggcttattaaggcctgtctttaactcaacacagaaggcaatgtctctgaatgtcacatgtgtttagtgaacctgcttgcttagtgtagaacactatttttagcaagcaccaaacacacacacacacacacacacacagatactgtatcacagcacctcatttgtccctatttgtttaccagactgtgacccatattggcctgggggccaggggaggccagacaccatatctaatttgtccctatgctgctacagggcctggcacaaaaccagcattcagtgtgtttgctgaaagaatggggttttaattgtgccctgtgaatgggtcgagagcaggtgttcctacactgaagtgccagtaaaattagggaatgggacacagaagggtctgtgagtgctgagaaatgacatcaaaagcacgtggggggatatgagagggagtggagaggggaggtggggatgtgtgggtggggggtgcagggggtatgtggtgagggggcagtgcccaggggaaagggctgcccatgtggagcatgcacacgcatcgtgtgtgtgtctatagaatctgcagatttcatcagctttttaaagggctgtgacctcaaaagtgtaaggatcacaggaatagactctataaaacaaccagcagtgatcagaaggaaccagttttcctttctgaaaggccgaagttggtattaaatgctttagcttagcagaaattgaaggagggctgcaccagactgttaaggcaaagcagatgtgagcactccccacatatctgtccccaacacagtaactggagatccggcatctctggaggtgaccagggattcccagtacccacccgtctctctcagtgtattacaagttgggagaaataagagtccattgtattcacaagcatgcataagggaattcagcttctgaactgtctgctgacagccagcacatcttccccttccagggtgggatcagtggccccatcaggactcccacatccttgcccaccgggtctttctgtcactgtgtacttggttgtctcctccactagaaagaaaattaagagtcttctttgcacatctctagtgaatacgtttgaaacctagacagataaaatggataatttcccagaaagatagagtttacaaaaattgactccagtagaagtagaaagtgtaaagagaccaattcccacagtatagagaaagccatcaagaaacaactccacaaagaagcaccaggtccaggcggcttcacagaggaattctatcacagctttagagaccagggagtcccagggagacagaaattattcctgagcttagaaaaggaaagaaacctaaacctgatagcacaaaaaataggccaatatgaatatcactcatgaatactgaaaaatgcttaaatattatctgatgccacaaccaccttaagaaaataatacaccaagtggagtccataccaaggatgtcttcatataaagaaatctaataatgtatgccaacacattaataggtctacgaagaataagatcatatttttccatagatgctaaaaaagcctttgatataattcaactcccatttgtaataaaaactctcgggggaaaaaagaaagaactaatacttcctttacataattcatacacctcaattttaaagccaacactggagtcctcctccaaggcaaggatgcccactgtcttcactatcatgtaacactctactggaggtattagttaatgcaattagacaagagaaaacaacagaggcacaattagaggcagtagctcagagaggacaggatctgggtctcattccccgttgtgaccctaggatctaacacagagggtgctcaatagctgaatgagtaaataaacaatggctcatattaattgaacacctccattaacaaaagcaagggtttactaaaccactagtaacagatcacatgctgtgttgatttaaatgggttaacctattcaaggcaggtaacggtcctatgaggcaagtggtattatttcagccattttacagataagcagacagatgtccagagagatgagatgacttgctcaagatcaccttgttggtaaacaaggttttcaattccagccctgccatggtcccagacaccttgctaactggtttgcatgtgtctctcaccaaatgagagaatgaggaccctaacacaatagttcagaacacatggtatggagcaacactgcccattttgggaaaattactttacctctctgtgccttagcgtcctcctccataaaacaggggtgataatagtgcctgcctcctagggttggagtggaatcacatgggctaatgaacgtctgctacatgctaaactccataaaatgagcatccgacctccccaaaattccctaatttaccttcaccaattctatcaacaatgtctgccccattagcagtacctttccttccttggtttttgccaagctcgtgcccagagttaaggatagaactttacatgcgtcaccaatatgttgccatctgggacaaaacctaataaaaagattaaggctagtgttcacccctgaggagtcccaccatacagaagcaaagagaggtgactgctattaacatctgggtgacccagagccagatgcacatctggggcagttcacattagcctcttaaagcttaccatgtcccttctctttttttgtctggtttgttggtttgagacagggtttcgcactgtcccatgggctggagtgcagtggcacgatcacggctcagggcagcctcgaactcctggggttaagagattctcctacctaagcctccgagtagctgggaagctgggtctacaggcatgcgcaactaggctaggctaattgttttatttttttatttttattagagatgaggtcttgctatgttgccccagctggtcttgaagccctggactcaagcaatcttcccacctcgacttcccaaattgttgggattgcaggcatgagccaccactcccggccacagcatcccttctctttctgggtgctaactcttctgtgctgcctacttctcagcaaagagtaagtgctttccagattctggagtattactctgtactccttaagtgtgggcttcatgtagtaatgccttccaaagagtttgaagaaactgagaaaagctacctctactgggtaatcaaggttagcattaatgataaatgacatggatagtatactttttgttgttgttttttgagacagagtctcactcttgtcacccaggctggagtgcaatggtgccacctgcctcactgcaacttctgcctactgggttcaagcaattctcctgcgtcatcctcctgagtttctggaattacagtgccttccaccatgcctggctaatttgtgtatttttagtagagttggggtttcaccatgttggccaggctggtcttgacctcctgacctcaggtgatccgcccgcctcagcctcccaaagtgttgggattacaggcgtgagccaccacgcctggctggatagtacatactcttgatacgatgtgatgagaagggagctttatctttgtgggcttcctcccgaaaacctagagccctagtctaatgaagggacagtctacaatacaaccaacactcctcaaaacagtgaaggtcacataaaacattcccaatctgaataaggcataaacctcagttaataatgtgtcaatattggtttgttggttacaataaatgcaccatactaatgtaaaacattaataacacggggaaacagggtattgggtatatgggaactctctgtgctatctttgcaacttttctgtaaatctgaaactgttccaaaaactgaagttttttttttgtttttttttttttgagaaaacagattccagggctttcattgtggtcatttagatacccatctggtggccaccaagcagcacttgccaagaaaaaccataaaaagtacctcccttcagatttggcttggaaactatttccccggaaatccccccaccccacccgacaaggaaaataaaagctgattaccaatctgggaggggtgtgagtattcgttccctgaaaaacatgactttaatcttaatgaacagaaagaccacggatattagtgcggatcgtttgcagattcttaattgtatcttttcaaagcaaaagatgtcctccagattgcaactctagaagactggtctcttctgttggctaattgtttccatctccagccaagacacaaaattattactaatgaccatctctgggtatccaagggaagaggatacccaaagctaaagcaaacccctcacctaacgtggccagagaggacaccgatggaagcgaaaacttcattatctgcctaacacagtgtttgtgggaaacatcaggccaccaagcctccttgacaggcttcctccacgagccagtcagcacaagcccttcctacacactagatggaggcaagcccagagtgcgtctggaagctactaacaggcctgccactgagccttcaacaagcattggctgggctgggctgggctgtcaaaatcaggaagcctggttgggttttttgttttttccaagacaacctgctaaccagaaatacacagtgaggttgggcgtgtggccgcttccccctcctcctcctcctccctctaacgaatgctcctgttaaacacgtgaagtgacagataagcattgggcccagcccggggaagtccccagcccccagcaactgagggcagttggaggcacagagtgacaaagttcaggcagaaagagcctgtgtccttctgaatccatgctgcagctgcccctcaccctaccccatcccaccacatccattaggactaagcgtagaagatcacttaatatagctcagaccaatcctcttgtgagtggtaagtgatgggttcagcagcagaacccagggaggaaatgggccggccttataataccaaaggttttaaccctctccagcatcagacagacaacctcttcctcagtttcaacacaaagtccccgtcaaccactgctcacaggaggtgatgggagctgcgtggcctcacttcagtgcctggagggaaggagcggcctcctacccttgataactgggttcagctgcaccccccttccttctttttttggcaactcctccctgctaactccattcttcgcttcctcacctcctccctccaaaggcacagaaatcatgtcccttgccctttgacagcccagtcccaggcaagaggccagcagacagcacccgccccccagccttgggacctgcctgccaccttttgttttgctgagagtgaccctcagggagcagtcatgagcaaccagaaactggtgcccctaaggggcaagagggagccgaccgccccctaagggtggcaggggccactgacgcctcccctccctggcacctgggtaggggcaccctccctccaggccccttaggaagggggacggctggagccaagaggactcctgtgcccagtccccaggcctgagcccctggcgggctcaggggccaggccaggggtagcctccaccgaccttcgttcggattcaaatactcatagtcgaagaggatggagaagtcaagctcgtcttgggggctgcccccaggctcgtggcctggggcgtccccgccgtcgggttggggctgccgctcgggggcgttcatggcgcgcagggcgggaaggctgcggggccgggggcgagggcgggcgcggctggctctgggacccctcgcagtggggctggcggaggcggctcgagcggcggggtccctttcctcgtagggacgcacgccgggtccggggacggcgcgcctggcgcagcgggtcctggacgcgcccggggaagctgagcggcggcggcgacggcggcgcgagcttcctgctccggaggcacctgttgcagcccggggaggcggggggggggggggcgtggaggcggggacagggcggccaggccggcgggggcggggccgccaccaggggaccggaggggaggggcgcgcggcctgggctggccggtgccgggaggaaggaggctgtccgcggacctgaccacactgtcccgggccaccgctgggcgctggggcggccgctgtctcccaccctccacgggtgagtgcgacacgcgctgcgcgaaccagggtctagacaagaaagctgccgccactaggacttttgccctaagggacccactggccccacactttttcctgcttttcttctccatggggtggaagggggtatccacccccttctattgcagacccgtgtctccaggcgtctccgtgtgcccacgggggcggcatgattttcacagtacttcagacacctgcatggccctgaactcaactccccagcgcctaggaaggaatcggactgacagcactagtcccccccgttacagctatgcctcctggccacctaccacgtgccaggtgctgggcacccagccggagccagacactgttgccctcggaagctcaggctctggtagtgggagaggcctgaaggagagaaacaggacaaaaagcatctgcttatggggccaggagagaactcaccagggtatgggataaaggttggggtggctttagtcccttgggtggtcaaggaggacctctctgaggaggtgacatttgaagaaacctgattgatgaggcgatcttggggaagtgtgttctggcagtgagaaccaaaacacagagccagagctcgaaggggctgggtgtgctggagggagaacgaggagtacagttctgatggggcggttggcaagtgacaaacacgcctggctgcttgtttaaagcatgattcccaggcccctccctggagcttctgattccataagtctgaatacagactcgtgaatgtgtatttttaattaagcacccaacgtgagcattaatgaacaggtacatttggcaaacactgcataaggacccagtaactaaagaacaccctccaataaaactctgccagggggctccaccaacttagctgaagttggaaacagactcacagaggtagaaaagatcaaaacagtggtcttcaacccttcccacatattagaatcacctgggacacctttttaaactcccgtgctgggctgcaatccaaacccactgaagcagaattcctaatttttttttttttttttttttttttttttggagacggagtctcgctctgtcgcccaggctggagtgcagtggcgcgatcttggctcattgcaagctctgccttctgggttcacgccattctcctgcctcagcctcccgagtagctgggactacaggcgccagccaccatgcctggctacttttttgtatttttagtagagatggggtttcactgtgttagccaggaaggtcttgatctcctgacctcgtgatccacccgcctcggcctccccaagtgctgggattacaggtgtgagccaccacgcccggcctgaaaatttttttaaacttcagatgaatctaaggtgcagccagtgttgaggatgagaagattagacgggagaggtcttaagatcctcgtgagaaccacagcttgacctcaagtgattcgaatccttccccatgtgccaggaggaattgaggacacgcattcttcaggggagccatctcagctccattaaggggatttgtgccaagccatccatcattccacaaatatttattgagcacctgcctggcactgccacaagatgttggggatgcaaccatcaacaagccacagcctctcccttcatcatgcttatgccctgaaagcaaagtagcacagttatgaacggggttttcaaaattgcactcagaccagtggttcttaacccagactacacattagaatcacctggagagctgttaaaatttgtattcaacgacctgagcaccaccagacatcgatttgatcagaatgtttggggttgggacttaggcatcagtattttgtaaaagctcaccagatgcttccaatgtgtggccagagatgagaaccactttggtttagactcaaactctactgcaggggcctgggggctggctcaggaatcatttcagagtcttgggcagcacctcctggttgtcagagcataaagaaattccagcctttgtttcctaactataagcacttctgtgccatgtgtatccaacaagcatcttgggggcagctgatgcatttaggtggaggaaggaagagtgaagaccccagctaggatacttatagacaggtatctagaaagagatggattcttctgggtccttatgacagggacccaaggtccagatgatgaaattttggccaataaacaagaaaaccaggcttcccctgtgatttagaaaaggagaaaagctaggaatgcctccccacatcctttctcgtccctccatcccataattattaagtgccactaaatctagtggacatttgttgattgtgcctacccagaataattcctcccttcttctcataacagcaccccagtgtgttccttggggaaactactctaaacataatcttggtagagctatcaacccagctgccccaccttccccaagcaacgaagtggatgaatgacccagactgcgccaatcagagaattttatctccactaactagcctgagatccactaaggcaggggctatgaccacctcattcgcagctttatgtgcaatggatgtgtggataaatggaggatggataagtagatggattgatggatgggtgaatggaagatggatgcatggatggaagatggatggatggatgaatagatgggtggatggatggataggggatggattgatggatgggtgaatggaagatggatgcatggatggaagatgggtggatggatgaatagatgggtggatggatggataggggatggatggaagaatggatggatgatggatggaggagtggatggagggtggatggacggatggatggaggataaatggataaatggatgaatgaaagatacatggatggattgatggaggatagatggatgaatggatggatgaaagagtgaatgtgttgcacggatgagtggatccattaatcaatggaagagtagatgtttgcctggatgaatgtagagtttgactctccttaaaatccttagagttttctttaagggtcctccaccctgaggcttaccctggccacccaaatgctatggcaagaacctaaattcttaccccaattccacttcctcttcagatacccaatgataaaatgagatattaaagggaagatcactttgcaactgatcaagtgctacaaaaatttcagcctgaggcaggaccgttcaggacagtctaactgcctttgttgtccctctgaacagtggatatattttcaaagcttctaggatttggagtctggactattgtagtcagagttctttaaaaggaagtgcttcagactaggtgccaacccataaaagagtttctgctggacagtggggagtaaaagggtcttcttccctaaaggttaccttgaagggtgggagtttgggctgggggaaaggcatattttcaattcaaaaataaataatctgtgctcttaggaacaaggtccaggagcagaatgcatgagctttatgcatcgagagtgactctgggaggtggagggatggaggtgggatggtgatcttcacagggcatcgctgtcaactttctctctatcctgtgtctgacctcctttggacaccctggcctctgagtttttccccagcctctccaaccgaagtgcaacagaaagctagtgaagccactgagactttgaaacttctagcacacattggtactatttgaccctggcccaggaactcagctcccttcaacatgcacttaacccacagtctaattacagactgaggtatgtgccgtgaaaggcaaggagaatgtgttacagagcttatgtcaaggaaacctgacgtagacagggaattcagataaggctgccctagggaggcgatgtttaagctgggactggaaggttggtagaagttagttagggaatgatgaggggaggtactaacagagcgatgagggagtatgtgtaaaggctctgaggcaggaggaaagtatgaaacgatggaggacccgaaagaagacaggagtggcaggtgctcagggaaggatgagaagatggtgtaagatcaggctgggaggtaagtggggcccaggagaccatgttgagagtttgggacctgaaagcaattgggaacaactggagagtgttaggcagcacatgacagaatcatagacgagtttttagatgatggctctgggttctctgaggatgagaaattgcaggggcaagggttgaagccggaggaccaagtagatggttcttatagccgtccaggaaagagataatgggggcgtagactacagagacaagtggtagccatagagataagaaaatgtggaaggattcacaagactcatagactgtcatcctttggtccctctgtgagttacctctcttcctcttctaggcttccttaaaatggagcataatttgggtccacctggatagaaacagtcaagaagcactgactcccgaaacgccttcaagaagctcctcctaccacccaaggtggctctgcgtccccaggctgcttcaagatggccctggagttacccaccacctacagctctgccttcctttccaccttctggtagaaagctcatttttatctacaacctgggcctctccacagaaatccaggcttgtatatccaatgacgacccaacatctccacgggagcatctaacaggcacctcagtgtgaatgtgtccaaaaccaaaccctacgtctccagctgttcctgcctcactgtgcctcaactcaagtattgctctgcctgtaatccagttctccaatcaaacaccaaagagtggttcttgagtcctcgccttttctcatgcccacgtgcaaaccctcagcaaaagcaggcagttgcaccaaatgtaacccaaagccacccatttctcactaacttcactgttcttcctcccacctcccaagaattcaggccttcattatttcttacttggacaactgcagaagcctcctccctggacttgctacttctacttttgcccctatgtggagcaaccagagggagcctttaaaaaatatacatctgataaaccctccagtggcttcccattaaattaaaattaaatacaaagcccttggtctgcaaggccctacgtaagctacgtcccacctgactctccttgggtatcatctcctgccattctccccttctcttactccctctgccaccctgatcgtccgcctgttccttgataacgcccacatgaccccaccccagggcctttgtacttactgttccctcagatattgcctggccactaccttactttgttcatttcacagctcaaaagtcacctgttagagaccttccctgcctgtcctaataaaaatcgcatcccccggcattctctgtctcctcaccctgcttcatgttcctcattgccctttccgctatggtgtattttattcatatgtatatttcttttattgcctgttcctttcacttgaatgcagtccccacaagggcagggatatttgtctgttttcttccctgggatatctagggttgccaagtttagcaaatacaaatacaggatacccagttaaatttgaattttagacaatgaatgcttttcttagtagaagaagtatgtccaaaatagtatgtgggacagacataaactaagaagttattcattgtttacctgaaattcaaatttaagtggacatcctgtatttttatctggcaaccccagctgtatccccagatcctagactggtacccagtacatggtagcttctcactaaaaagcagctgaaggaaagaatggaagaatggcgcccaacagagcttctacctgagatcaatcagtgaataaaactgcaccactaggagaacccaaagtcccttctttgctcagctttatgggactcaacagggatgtcctgaaatttagcagtgttttgtagccttggcagcccagcctctagcctggttccaatacctgtaattatttgtagagaaataacatgtcatctgactcaatggcttcagggaaattctacctgcacatgttgcttaaaaagaaaaagagcctggtacagtggtgcacacctgtagttccagctacctggagactgagatggaaggatcgctcaagcccatgagtctgagacggcaatgtgtgacaatttcacctgtgaaaaccacagcacttcagcctaggcaacacagcaagaccccgtctccaaaacaaggagtgagagaaaaaaaaagaatattataaaagacaatgttctgttatagaaaatatgtaaatagcttcttgaggttttttggtttttttgtttgtttgtttgtttgtttgtttgagatggagttttgctcttgttgcccaggctggagtgcaacggtgcaatctcagctcaccgcaacttctgcctcccaggtgcaagcgattctcctgcctcagcctcccgaatagctgggattataggcatgtgccaccacacccagctaatttgagttctttacaacaagactggtacatatgaaccccttccaccccttccaggctgactttcctgctgaaggtcaatggcatgaagacataaatgtctgaccaagcctggagtgatcttgtgatacattaaagaacaacccagagctgggaggcccaggatccaaactgagttcttcctctcactctgtgacctttaagcaagacaccttcagtgcctcagtttctctgtctgtaaaatgggaagagatgaattagataatacctgagttaccatttcagctctaaaattcaaggattgtttaacaaggaaaaccaagctaatctgagtagcagccggggctcgcttcatgggatgtgacatgcagagtcacacggcattccgcacctggaataacctgtgcttagaaggagcctgcacttggttgaatgctctgctgttgacattttttaaattctgaatactttttgaacaagaggcgatgcattttcatttcgcacaatgccctgaaaattatgtagccggctctgatagtgtacaagtgctcctcaacttatggtgggtgatatcccaatatacccatgatacactgaacatattgttgggttgaaaatgcatttaggcagggcatggtggctcacgtctataatcccagcactttgggaggctgaggcaggaggatggcctgaggccaggagtttgagaccagcctaggcaacatagtaagatcctgtctctatgaaaaataaaaatacattagccgggctcccatttgagcccaggagcttgaggctgcagtgagccatgatcgcaccactgcattccaaaagagtaagaccccatgtctaaaaaataataataataggccaagcacggtggctcatgcaagcctgtaatcccaggactttgggaagccaaggtgggtggatcacctaaggtcaggagttcgagaccagcctggccaatgtggtgaaaccccgtctctactaaaaatacaaaaaatagccaggcatggtggtgggcgcctgtaattccagctactcgggaggctgaggcaggagaatcgcttgaacctgggaggtggaggttgcagtgagccgagattgcgccattgtactccagcctgggtgacaagagcgaaactccatctcaaataataataataataataataaatacaaagaaaatgcatttaatatgcttaacccactgaacaccatagcttagtctagcctaccttaaacatgctcagaacatttacagtcacctacgcaattgattttaggcaaaataacccaacacaaagactactttataatgaggtgttgaatatcttctgtaatttattgaatactataccaaaagagaaaaacagaatggtttatgggtacccaaagtacagtttctactgaactcatatcgctttcacaccatcgtaaagaaagcctaagtcaaacatcataagtcagagaccatctgtataacacataagtcacacattttcatcatgaactccatgtcctaacaacctcccattataataaaacactgcttataaaaggcaggcattgaaacgttttaagttggattcaaaaagtgggaacattctttaccagactccaaaaaccatctcccttcaacggaagcattccctgggactcatgatcactctaggtgttaatatataacttatacacagatgcatttgactccagcaaggctggcactaaggtgaggcaagagaggtaaaatgaaagagggcaccaaaaactcagtaattagataaattatatcttcacaccatgttttaaaacatcaaaatgaatgcaaaaaaaaatcctcgctgaacaagctattataattttaataaagacagggtcagtaacagtccatgtgagccacactgcaccctaaggccacagggaaaatgagtaatgttgatcttgtctttatttaacatttttatttatttattttttttgagacagggtcccactcagtcacccaggatggagtgcagtggcgagagcatggctcactgcagcttcaacctccccagctcagatgatccgctcacctcagcctcctagtagctggggctacaggctcctgccaccatgccctgctattttttttttttttttttttctggagagacaaggtctcactatgttgcctaggttggtctcgaactcctgggctcaagctaccgcatctggcctttttaaaaaaagcttatcatggagttttggcatgataagccaaaattttaaaacaaaaattttgttttaaaaatattatattaggtcgcacacagtggctcatgcctgtaatcccagcacattgggaggccaaggtgggcggatcatgaggtcaggagatcaagaccatcctggctaacatggtgaaacccaatctctactaaaaatacaaaaagttagccgggtgtggtggcgggtgcctgtagtcccagctactcgggaggctgagggaggagaatggcatgaacctgggaggtggagcttgcagtgagctgagatcacgccactgcactccagcctgggcgacagagcgaggctccatctcaaaaaaaaaaaaatgtgtattaaaatatggttcatcctgggcttacgcctgtaatcccaacattttgggaggccaaggtgggaggatcgcttgagcccaggagttcaagaccagcctgggcaacatagtgacaccccatctttatgaagctgaaacaggaggatggcttgagcccaggaggctgacgctgcagtgagccgtgttcgtgccactgcactccagcccaggtgacagagcaagtacctgtctcaaatatatatacatttcatatatgtatgtgtgtctgtgtgtgtatatatatatacatatagttcatcctgattactgaatttcttgcattttgctcccccaaatgcctcattggcttcctcatgctcttgcaaagccatttttagggatgagctccttatagattgagaaaacaagacagtttcaaacctgacttgcactccaatctatcatctcctacagagtcttttaaagcccgaagaggacttctctgttgtgagaaaactattttccaagaggggattgcagcaaaaggccgttagttgaatatgccaccctcccactgggcaggcactgatggccatcagtacctcgtaagacagcagggttctactaaaagccaacacccaaatcaacgggtggactgtaggaagatgccccatttgacagcagtagaagtcacaggtctgcaggagctccaccaagtccatcctgcaggcatattatgtttggcctgcccagtaatttatttttaatctgaactaatatttttattttttttaattatatattaagttctgggatacatgtgcaggacgtgcaggtttgttacatcagtaaacatgtgtcatggtggtttgctgcacccatcaacccatcacctaggtactaagccccacatgcattagctatttatcctgatgctctccctcccgcaccttcctggcaaggccccagtgcttcttgttctcctccctgtgtccatgtcgaactaacatttttaaattgggagatttcacataaaagtccaaaattccaacttcttaaaaaaaaaaggcaggcagatcccgccactccaggcctacattcccgtatggaccaatcggctggaggtgagtagaggctgttccctggggatgccctcctccgtttgccccagcccccacctgtcttcctcattcatttgttccacctgccgggagcctgtgagcttgagcgcctgggctgcagagtcttgattccttccacctggtccccgcacaactactttgccctggttttgtttctcctctttgttccttgctttctagcacgttcccctctgtcttgggtaaaaacgtttagaaggagggcaggcgtgctgggcgcggtggctcacgcctgtaatcccagcactttgggaggccgaggtgggcggatcacgaggtcaggagatcgagaccatcctggctaacacggtgaaaccccgtctctactaaaaatacaaaaaattagccgggcatggtggcaggtgcctgtagttccagctactcgggaggctgaggcaggagaatggcatgaacctggaaggcaggagcttgcagtgagccgagatcatgccactgcactccagcctgggcgacagagcaagactccatctcaaaaaaaaaaaaaaaaaagagggagggcaggctcagtaaacctgcctcccccttaaacgacggtccttgatcttaactgaacaggagatgccgccatccctctgccagggaggctccatcttctaccaaggtagaacctcaaggggcagggtgggtagggctggttcgttaggggatagagtattggttaatatctgcccatccccacaatcatttctcactcaatgtacctgtcaccgtcggcccactgtcccccctcagtcacccaagctgtcttcccctgtatgccccaagatcatttctctctccattctcttccctgccatattctttgcagactcaaacatctgtaccgatttcctaatctttgaagtcagggagtgatgaggacaagctggctgactcagaggtacccgtcatcagctcccatccgcacaactaaaccctggagcacacacccccaccgcctccaaaaaagcacaagacatcggctgttctctccctcttttgcttctccatcaacacaatcactagacctcacctaagctcatagtcacttagcttataaatgacttcctatgtctcccccaacttcacaaaaacatctctatctgactttcaaatgcaaacaggcatgtctcatagacgttgggtttttctccccaccacctcaccaggagctctgcatctgttagactctccacaagcacctctggactcagtggctcagtgattgaagtgggtcatcaggaccctacagaaaagaccccagaggcttggtagaaagtggatttgtccctacaggaactcctgaaagttactgagctggaggaaagaaataaattgaatttaaaacaatagtaaaaatggaagctaacaggaactgacccctttgtctttgctgagagcgtcacagacacgatttcctttcaaccttaaagtacccccatgtgtaagaattactaatagcccacttttcagttaaggaaatgagggcgtgcagcaggttgtggtgtgacttgcaaagtcacacgtgcaccatgaaaatggttttgtctcgcacgagtctgatactcattactgagtcatgctattcctgggtgattagctaagggtggatttgccaagggacatttctggatcaagatgaaacccagaaaagtcttcatgactgccagtgatagcggagggtggaggaggagctgacgaggggaatccaggcggggctgacaagaaagcacatctgaagtggttcgaatattcataggattgatggcatctacccctaggtaccaaagccagggaccatccctgtggaaccctggggctcgagggaacacagtttgagaaccctaaaggagaaagctctatggactgggaggcactgcttctgagcagctctcctgccccacactggccccagccatcttcatctcctgcctggaccactgcagcagcctcctgtttgcctgcctagcattcactcttacctggctagaggctgctctccccttaatgggcagtaagaccatttgaaaagattcattagaccacataccactgctgctgaacattcccccaggggctcctgattaccccaggaatgaacttcagactccttacaagatcctatgtgggccgggtgcggtggctcatgcctg
